(19) United States
(12) Patent Application Publication
(10) Pub. No.: US 2016/0060642 A1
(43) Pub. Date: Mar. 3, 2016

(54) G Protein Coupled Receptor Libraries

(71) Applicant: COMMONWEALTH SCIENTIFIC AND INDUSTRIAL RESEARCH ORGANISATION, Campbell, Australian Capital Territory (AU)

(72) Inventors: Stephen Trowell, Oxley (AU); Alisha Anderson, Curtin (AU); Muhammed Tehseen, Queanbeyan (AU); Mira Dumancic, Oxley (AU); Lyndall Briggs, Rivett (AU); Jian Wang, Aranda (AU)

(21) Appl. No.: 14/781,893

(22) PCT Filed: Apr. 16, 2014
(86) PCT No.: PCT/AU2014/000435

§ 371 Date: Oct. 1, 2015

(30) Foreign Application Priority Data
Apr. 16, 2013 (AU) 2013901329
May 30, 2013 (AU) 2013901925

(51) Int. Cl. C12N 15/81; C07K 14/435; G01N 33/74; C12Q 1/02; G01N 33/64

(52) U.S. Cl. CPC C12N 15/81; C12Q 1/025; G01N 33/64; G01N 33/74; C07K 14/43545; G01N 2333/43534; G01N 2333/726

(57) ABSTRACT

The present invention relates to a yeast cell expressing a nematode G protein coupled receptor (GPCR), whereby ligand binding to the GPCR results in a detectable signal. In particular, the present invention relates to a yeast library expressing a range of different GPCRs, and to methods of screening said library.

### FIELD OF THE INVENTION

[0001] The present invention relates to a yeast cell expressing a nematode G protein coupled receptor (GPCR), whereby ligand binding to the GPCR results in a detectable signal. In particular, the present invention relates to a yeast library expressing a range of different GPCRs, and to methods of screening said library.

### BACKGROUND OF THE INVENTION

[0002] Typically, G protein coupled receptor (GPCR) screening in yeast is performed for a single (or a small number of) GPCR(s) to be identified and validated as a potential target for therapeutic activity or selective toxicity. These are then screened with large and/or diverse chemical libraries in order to identify lead compounds for clinical chemistry and drug development. The screening assay may then be used to aid the process of lead optimisation.

[0003] In contrast, the screening of protein libraries expressed in yeast for new protein-ligand interactions relies on a large number of different molecules being reliably expressed in yeast. This leads to challenges in sensitivity and robustness of the assay. This is particularly the case when considering using a relatively uncharacterised class of proteins such as nematode GPCRs, and screening with volatile ligands. These aspects require stable high-level expression of the nematode GPCRs and tightly regulated but strongly ligand inducible expression of the reporter if the screening assay is to have a sufficiently large z factor to be usable.

[0004] Minic et al. (2005) relates to a screening assay for mammalian chemoreceptors based on results with the rat olfactory receptor 17 and human OR17-40. Their methodology used an inducible gal promoter to drive expression of the rat OR, rat Gα_{olf} to couple receptor activation to the yeast's endogenous GPCR transduction cascade and the fus-1 promoter to drive expression of the reporter gene firefly luciferase. However, efforts to reproduce this assay, including replacing the mammalian Gα_{olf} with a nematode-yeast chimeric Ga, gpa-1/odr-3, proved unsuccessful (unpublished results).

[0005] There is a need for methods of screening yeast libraries expressing nematode GPCRs for the identification of novel receptor-ligand pairs, especially where the ligand is a volatile compound.

### SUMMARY OF THE INVENTION

[0006] Nematode receptors comprise a unique GPCR clade (Fredriksson and Schioth, (2005). Various yeast expressing heterologous GPCRs assays have been described, however, the inventors were surprised to find that none worked to any useful extent with nematode GPCRs. Accordingly, the inventors had to develop their own assay.

[0007] In a first aspect, the present invention provides a yeast cell comprising

[0008] i) a first high copy number extrachromosomal polynucleotide comprising a first polynucleotide encoding a nematode G protein coupled receptor (GPCR) operably linked to a constitutive promoter,

[0009] ii) a second high copy number extrachromosomal polynucleotide comprising a second polynucleotide encoding a galactosidase, or a selectable growth marker, operably linked to a promoter activated by the yeast MAP kinase pathway, wherein the promoter is not a FUS-1 promoter,

[0010] iii) a mutated yeast gpa-1 gene, and

[0011] iv) a third polynucleotide encoding a chimeric G protein comprising the N-terminus of a yeast gpa-1 and at least four C-terminal amino acids of a nematode G protein, operably linked to a promoter,

wherein each promoter directs expression of the polynucleotides in the cell.

[0012] In a preferred embodiment, the yeast further has a mutated sst-1 gene and a mutated far-1 gene.

[0013] In a further preferred embodiment, the yeast further has a mutated ste-2 gene.

[0014] In an embodiment, when a ligand binds the GPCR the resulting z factor is about 0.5 to 1, or about 0.70 to 1, or about 0.8 to 1, or about 0.9 to 1, or between about 0.8 to about 0.98, or between about 0.9 to about 0.98, or about 0.94.

[0015] In an embodiment, the promoter activated by the yeast MAP kinase pathway is the FIG-1 or FIG-2 promoter.

[0016] In a further embodiment, the constitutive promoter operably linked to the first polynucleotide is selected from the PGK promoter, the ADH-1 promoter, ENO promoter, the PYK-1 promoter, and the CYC-1 promoter.

[0017] In yet a further embodiment, the cell comprises at least about 75, or at least about 100, or at least about 150, or between about 75 and about 500, or between about 100 and about 400, or between about 100 and about 250, copies of the first and second high copy number extrachromosomal polynucleotides.

[0018] In a preferred embodiment, the yeast is Saccharomyces cerevisiae.

[0019] Preferably, the yeast is haploid. In an embodiment, the yeast is mating type a. In instances where the yeast is mating type a it is preferred that the ste-3 gene is mutated rather than the ste-2 gene.

[0020] In an embodiment, the third polynucleotide is stably integrated into the genome of the yeast cell.

[0021] In an embodiment, the nematode is Caenorhabditis elegans.

[0022] In an embodiment, the nematode GPCR is a chemoreceptor, odorant receptor or taste receptor.

[0023] As the skilled person would appreciate, a wide variety of different nematode GPCRs can be used in the invention. In an embodiment, the nematode GPCR comprises an amino acid sequence which is at least 80%, at least 90%, at least 95% or at least 99%, identical to one or more of SEQ ID NO's 1 to 297, and/or is encoded by a polynucleotide which comprises a nucleotide sequence which is at least 80%, at least 90%, at least 95% or at least 99%, identical to one or more of SEQ ID NO's 310 to 606.

[0024] In an embodiment, the chimeric G protein comprises about 5 C-terminal amino acids of the nematode G protein. In an embodiment, the chimeric G protein comprises an amino acid sequence which is at least 80%, at least 90%, at least 95% or at least 99%, identical to one or more of SEQ ID NO's 298 to 303, and/or is encoded by a 20 polynucleotide which comprises a nucleotide sequence which is at least 80%, at least 90%, at least 95% or at least 99%, identical to one or more of SEQ ID NO's 304 to 309.

[0025] In an embodiment, the selectable growth marker is a nutritional marker or antibiotic resistance marker. As the skilled person would appreciate, a wide variety of nutritional markers are useful for the invention including, but not limited to, HIS3, ADE2, URA2, LYS2, ARG2, LEU2, TRP1, MET15, HIS4, URA3, URA5, SFA1, LYS5, ILV2, FBA1, PSE1, PDI1 and PGK1.

[0026] In an embodiment, the galactosidase is a β-galactosidase or an α-galactosidase.

[0027] In an embodiment, the β-galactosidase is LacZ.

[0028] In an embodiment, the promoter operably linked to the third polynucleotide encoding the chimeric G protein is the endogenous gpa-1 promoter.

[0029] In an embodiment, the extrachromosomal polynucleotide is a plasmid, cosmid or virus. In a preferred embodiment, the extrachromosomal polynucleotide is a plasmid.

[0030] Also provided is a population or library of yeast cells of the invention, wherein at least 10, at least 25, at least 50, at least 100, of the yeast cells have different nematode GPCRs.

[0031] In an embodiment, on average each yeast cell comprises at least 100 copies of each of the first and second high copy number extrachromosomal polynucleotide.

[0032] In an embodiment, the population or library comprises at least 10, at least 25, at least 50, at least 100, at least 200, at least 250, or all of the nematode GPCRs which comprise an amino acid sequence provided as SEQ ID NO's 1 to 297, or which are at least 80%, at least 90%, at least 95% or at least 99%, identical to one or more of SEQ ID NO's 1 to 297.

[0033] Also provided is a composition comprising a yeast cell of the invention, or a population of yeast cells of the invention.

[0034] The yeast cells of the invention can be used to identify new ligand/receptor pairs.

[0035] Thus, in another aspect, the present invention provides a method of screening for a ligand that binds and activates a nematode G protein coupled receptor, the method comprising

[0036] i) contacting a yeast cell of the invention with a candidate ligand, and

[0037] ii) determining if the cell expresses galactosidase, or the selectable growth marker,

wherein the presence of galactosidase activity, or activity of the selectable growth marker, indicates that the ligand binds and activates a nematode G protein coupled receptor.

[0038] In an embodiment, the z factor of the method when the ligand binds and activates a nematode G protein coupled receptor is about 0.5 to 1, or about 0.70 to 1, or about 0.8 to 1, or about 0.9 to 1, or between about 0.8 to about 0.98, or between about 0.9 to about 0.98, or about 0.94.

[0039] In an embodiment, the ligand is volatile.

[0040] In a further embodiment, the ligand is from a library of compounds.

[0041] In a further embodiment, the method comprises screening a population or library of the invention.

[0042] In an embodiment, at least two or three separate yeast colonies/cultures expressing the same G protein coupled receptor are screened for ligand binding.

[0043] In a further aspect, the present invention provides a method of detecting a ligand in a sample, the method comprising

[0044] i) contacting at least one yeast cell of the invention which comprises a nematode G protein coupled receptor which binds and is activated by the ligand,

[0045] ii) determining if the cell expresses galactosidase, or the selectable growth marker,

wherein the presence of galactosidase activity, or activity of the selectable growth marker, indicates that the ligand is present in the sample.

[0046] The present inventors have also identified specific polypeptides which bind cyclohexanone, and hence can be used in methods for detecting this compound.

[0047] Accordingly, in a further aspect the present invention provides a method of detecting cyclohexanone in a sample, the method comprising

[0048] i) contacting the sample with a polypeptide which comprises an animo acid sequence provided as SEQ ID NO:26 or SEQ ID NO:287, or a variant thereof which binds cyclohexanone, and

[0049] ii) detecting whether the polypeptide is bound to cyclohexanone.

[0050] In an embodiment, the variant comprises an animo acid sequence which is at least 80%, at least 85%, at least 90%, at least 95%, at least 97%, or at least 99%, identical to SEQ ID NO:26 or SEQ ID NO:287, or a cyclohexanone binding fragment thereof.

[0051] In an embodiment, the polypeptide is detectably labelled. In a further embodiment, the polypeptide is labelled with a resonance energy transfer (RET) acceptor and donor pair such that when the cyclohexanone binds the labelled polypeptide the spatial location and/or dipole orientation of the donor molecule relative to the acceptor molecule is altered. In yet a further embodiment, the acceptor molecule is a bioluminescent protein. In a further embodiment, the bioluminescent protein is incorporated into the fifth non-transmembrane loop of the polypeptide, and the acceptor molecule is incorporated into the C-terminus of the polypeptide, or b) the acceptor molecule is incorporated into the fifth non-transmembrane loop of the receptor, and the bioluminescent protein is incorporated into the C-terminus.

[0052] In a particularly preferred embodiment, the bioluminescent protein is a Renilla luciferase or a biologically active variant (such as RLuc2 or RLuc8) or fragment thereof, the acceptor molecule is green fluorescent protein 2 (GFP²), and the substrate is Coelenterazine 400a.

[0053] In an embodiment, the sample is a gas or air sample.

[0054] In an embodiment, the cyclohexanone is detected using microfluidics.

[0055] Any embodiment herein shall be taken to apply mutatis mutandis to any other embodiment unless specifically stated otherwise.

[0056] The present invention is not to be limited in scope by the specific embodiments described herein, which are intended for the purpose of exemplification only. Functionally-equivalent products, compositions and methods are clearly within the scope of the invention, as described herein.

[0057] Throughout this specification, unless specifically stated otherwise or the context requires otherwise, reference to a single step, composition of matter, group of steps or group of compositions of matter shall be taken to encompass one and a plurality (i.e. one or more) of those steps, compositions of matter, groups of steps or group of compositions of matter.

[0058] The invention is hereinafter described by way of the following non-limiting Examples and with reference to the accompanying figures.

### BRIEF DESCRIPTION OF THE ACCOMPANYING DRAWINGS

[0059] FIG. 1. Summary of the yeast pheromone responsive pathway, showing key molecules of interest for the development of the screening assay.

[0060] FIG. 2. Summary of the yeast GPCR transduction cascade modified to support screening of nematode chemoreceptors with ligands. Compare with FIG. 1.

[0061] FIG. 3. Summary of chromosomal and plasmid based genetic modifications required to allow S. cerevisiae to support the screening of nematode chemoreceptors. The Gα-KAGMM chimaera may be replaced with chimaeras between yeast gpa-1 and other nematode Gα proteins.

[0062] FIG. 4. Composite fluorescent image showing expression of GFP2 tagged nematode ODR-10 chemoreceptor (OGO) under the control of the constitutive PGK promoter in S. cerevisiae (ste-2, sst-2, far-1 triple mutant) cells. A 20 μl drop of yeast culture was placed on a clean glass slide and stained with Evans Blue dye—a plasma membrane specific dye (0.01% in culture medium, Sigma) for one minute, covered with a cover slip, and observed with a Leica SP2 laser confocal microscope. Samples were excited at 488 nm and images were collected at 510 nm for GFP2 emission and 660 nm for Evans blue emission. Scale bar 10 μm.

[0063] FIG. 5. Fluorescence emission scans of Cyb-KAGMM expressing the ODR-10 receptor after exposure to 50 μM or 500 μM diacetyl. A: pGK:Odr10 with Fus1:GFP, B: Biological repeat of “A” under the same conditions, C: pGK:Odr10 with Fig2:GFP. Excitation was at 420 nm. Note that 50 μM diacetyl is below the uninduced condition in panel “C”. VC=vector control.

[0064] FIG. 6: Qualitative assay of the reporter gene Lac-Z using 5-bromo-4-chloro-indolyl-β-D-galactopyranoside (X-Gal) as a substrate. Lac-Z expression was driven by the FUS-1 promoter. UN=uninduced.

[0065] FIG. 7. Qualitative assay of volatile-induced expression of LacZ using orthonitrophenyl-βD-galactopyranoside (ONPG) as a substrate. The assay was performed using FIG1, FIG2 and FUS1 promoters. The vector control did not include the odr-10 gene. Acetoin was also used as a negative ligand control with the FIG-1 and FIG-2 but not the FUS-1 promoters.

[0066] FIG. 8. Quantitative assay of the response of the LacZ reporter gene, driven by the FIG2 promoter, to eleven different concentrations of diacetyl using ONPG as substrate. PGK::Odr-10 (green bars); PGK::H110Y odr-10 mutant (red bars); empty vector control (blue bars). Values are mean and standard deviations of three technical repeats.

[0067] FIG. 9. Quantitative assay of the response of the LacZ reporter gene, driven by the FUS1 promoter, to eleven different concentrations of diacetyl using ONPG as substrate. PGK::Odr-10 (green bars); empty vector control (red bars). Values are mean and standard deviations of three technical repeats.

[0068] FIG. 10. Molecular phylogeny (sequence relationships) of the 578 members of the str chemoreceptor superfamily of C. elegans. The position of the one odorant receptor previously characterised (odr-10) is shown with an arrow.

[0069] FIG. 11. Effects of starting culture dilution and volume of wells on diacetyl-induced lac-Z expression in the lacZ/Odr10/gpa1-KAGMM/ste2⁻ sst2⁻ far1⁻ gpa1⁻ strain of S. cerevisiae following the methods described in Example 2 and throughout the text. Lac-Z expression is estimated by the level of ONPG conversion at Abs_{414 nm} following cell lysis and a 30 minute substrate incubation.

[0070] FIG. 12. Plate assay of nematode GPCRs expressed in yeast to and tested (induced) with cyclohexanone. The key for the different wells is provided in Table 2. Colonies B7, D2 and H9 showed significant yellow colour compared to other wells. H9-12 are the control colonies and were tested to 500 μM diacetyl while all the other colonies were tested to 5 mM cyclohexanone.

[0071] FIG. 13. Normalized Spectra of plate tested against (induced with) cyclohexanone. Wells B7(), D2 (▪) and positive control H9 (▴) showed a clear peak at 420 nm, indicating they were activated by tested ligands. None of the other wells showed significant peaks at 420 nm, for example, well G6 (*) and the negative control H11 (×).

### KEY TO THE SEQUENCE LISTING

[0072] SEQ ID NO: 1 is an amino acid sequence of a Caenorhabditis elegans G protein coupled receptor (GPCR) of Srn-1;

[0073] SEQ ID NO: 2 is an amino acid sequence of a C. elegans GPCR of Str-1;

[0074] SEQ ID NO: 3 is an amino acid sequence of a C. elegans GPCR of Str-102;

[0075] SEQ ID NO: 4 is an amino acid sequence of a C. elegans GPCR of Str-108;

[0076] SEQ ID NO: 5 is an amino acid sequence of a C. elegans GPCR of Str-111;

[0077] SEQ ID NO: 6 is an amino acid sequence of a C. elegans GPCR of Str-112;

[0078] SEQ ID NO: 7 is an amino acid sequence of a C. elegans GPCR of Str-113;

[0079] SEQ ID NO: 8 is an amino acid sequence of a C. elegans GPCR of Str-114;

[0080] SEQ ID NO: 9 is an amino acid sequence of a C. elegans GPCR of Str-114 SV;

[0081] SEQ ID NO: 10 is an amino acid sequence of a C. elegans GPCR of Str-12;

[0082] SEQ ID NO: 11 is an amino acid sequence of a C. elegans GPCR of Str-120;

[0083] SEQ ID NO: 12 is an amino acid sequence of a C. elegans GPCR of Str-120 SV;

[0084] SEQ ID NO: 13 is an amino acid sequence of a C. elegans GPCR of Str-123;

[0085] SEQ ID NO: 14 is an amino acid sequence of a C. elegans GPCR of Str-124;

[0086] SEQ ID NO: 15 is an amino acid sequence of a C. elegans GPCR of Str-125;

[0087] SEQ ID NO: 16 is an amino acid sequence of a C. elegans GPCR of Str-129;

[0088] SEQ ID NO: 17 is an amino acid sequence of a C. elegans GPCR of Str-13;

[0089] SEQ ID NO: 18 is an amino acid sequence of a C. elegans GPCR of Str-130;

[0090] SEQ ID NO: 19 is an amino acid sequence of a C. elegans GPCR of Str-131;

[0091] SEQ ID NO: 20 is an amino acid sequence of a C. elegans GPCR of Str-134 V;

[0092] SEQ ID NO: 21 is an amino acid sequence of a C. elegans GPCR of Str-135;

[0093] SEQ ID NO: 22 is an amino acid sequence of a C. elegans GPCR of Str-139;

[0094] SEQ ID NO: 23 is an amino acid sequence of a C. elegans GPCR of Str-14;

[0095] SEQ ID NO: 24 is an amino acid sequence of a C. elegans GPCR of Str-141;

[0096] SEQ ID NO: 25 is an amino acid sequence of a C. elegans GPCR of Str-143;

[0097] SEQ ID NO: 26 is an amino acid sequence of a C. elegans GPCR of Str-144;

[0098] SEQ ID NO: 27 is an amino acid sequence of a C. elegans GPCR of Str-146;

[0099] SEQ ID NO: 28 is an amino acid sequence of a C. elegans GPCR of Str-148;

[0100] SEQ ID NO: 29 is an amino acid sequence of a C. elegans GPCR of Str-151;

[0101] SEQ ID NO: 30 is an amino acid sequence of a C. elegans GPCR of Str-153;

[0102] SEQ ID NO: 31 is an amino acid sequence of a C. elegans GPCR of Str-155;

[0103] SEQ ID NO: 32 is an amino acid sequence of a C. elegans GPCR of Str-159;

[0104] SEQ ID NO: 33 is an amino acid sequence of a C. elegans GPCR of Str-162;

[0105] SEQ ID NO: 34 is an amino acid sequence of a C. elegans GPCR of Str-163;

[0106] SEQ ID NO: 35 is an amino acid sequence of a C. elegans GPCR of Str-164;

[0107] SEQ ID NO: 36 is an amino acid sequence of a C. elegans GPCR of Str-165;

[0108] SEQ ID NO: 37 is an amino acid sequence of a C. elegans GPCR of Str-166;

[0109] SEQ ID NO: 38 is an amino acid sequence of a C. elegans GPCR of Str-168;

[0110] SEQ ID NO: 39 is an amino acid sequence of a C. elegans GPCR of Str-169a;

[0111] SEQ ID NO: 40 is an amino acid sequence of a C. elegans GPCR of Str-170;

[0112] SEQ ID NO: 41 is an amino acid sequence of a C. elegans GPCR of Str-171;

[0113] SEQ ID NO: 42 is an amino acid sequence of a C. elegans GPCR of Str-172;

[0114] SEQ ID NO: 43 is an amino acid sequence of a C. elegans GPCR of Str-173;

[0115] SEQ ID NO: 44 is an amino acid sequence of a C. elegans GPCR of Str-174a;

[0116] SEQ ID NO: 45 is an amino acid sequence of a C. elegans GPCR of Str-174 SV;

[0117] SEQ ID NO: 46 is an amino acid sequence of a C. elegans GPCR of Str-177;

[0118] SEQ ID NO: 47 is an amino acid sequence of a C. elegans GPCR of Str-178;

[0119] SEQ ID NO: 48 is an amino acid sequence of a C. elegans GPCR of Str-180a;

[0120] SEQ ID NO: 49 is an amino acid sequence of a C. elegans GPCR of Str-180b;

[0121] SEQ ID NO: 50 is an amino acid sequence of a C. elegans GPCR of Str-181;

[0122] SEQ ID NO: 51 is an amino acid sequence of a C. elegans GPCR of Str-182;

[0123] SEQ ID NO: 52 is an amino acid sequence of a C. elegans GPCR of Str-183;

[0124] SEQ ID NO: 53 is an amino acid sequence of a C. elegans GPCR of Str-185;

[0125] SEQ ID NO: 54 is an amino acid sequence of a C. elegans GPCR of Str-19;

[0126] SEQ ID NO: 55 is an amino acid sequence of a C. elegans GPCR of Str-190;

[0127] SEQ ID NO: 56 is an amino acid sequence of a C. elegans GPCR of Str-193;

[0128] SEQ ID NO: 57 is an amino acid sequence of a C. elegans GPCR of Str-198;

[0129] SEQ ID NO: 58 is an amino acid sequence of a C. elegans GPCR of Str-2;

[0130] SEQ ID NO: 59 is an amino acid sequence of a C. elegans GPCR of Str-20;

[0131] SEQ ID NO: 60 is an amino acid sequence of a C. elegans GPCR of Str-20 SV;

[0132] SEQ ID NO: 61 is an amino acid sequence of a C. elegans GPCR of Str-204;

[0133] SEQ ID NO: 62 is an amino acid sequence of a C. elegans GPCR of Str-205;

[0134] SEQ ID NO: 63 is an amino acid sequence of a C. elegans GPCR of Str-207;

[0135] SEQ ID NO: 64 is an amino acid sequence of a C. elegans GPCR of Str-211;

[0136] SEQ ID NO: 65 is an amino acid sequence of a C. elegans GPCR of Str-214;

[0137] SEQ ID NO: 66 is an amino acid sequence of a C. elegans GPCR of Str-220 SV;

[0138] SEQ ID NO: 67 is an amino acid sequence of a C. elegans GPCR of Str-221;

[0139] SEQ ID NO: 68 is an amino acid sequence of a C. elegans GPCR of Str-222;

[0140] SEQ ID NO: 69 is an amino acid sequence of a C. elegans GPCR of Str-224 SV;

[0141] SEQ ID NO: 70 is an amino acid sequence of a C. elegans GPCR of Str-225;

[0142] SEQ ID NO: 71 is an amino acid sequence of a C. elegans GPCR of Str-227;

[0143] SEQ ID NO: 72 is an amino acid sequence of a C. elegans GPCR of Str-229;

[0144] SEQ ID NO: 73 is an amino acid sequence of a C. elegans GPCR of Str-23;

[0145] SEQ ID NO: 74 is an amino acid sequence of a C. elegans GPCR of Str-230;

[0146] SEQ ID NO: 75 is an amino acid sequence of a C. elegans GPCR of Str-231;

[0147] SEQ ID NO: 76 is an amino acid sequence of a C. elegans GPCR of Str-232;

[0148] SEQ ID NO: 77 is an amino acid sequence of a C. elegans GPCR of Str-233 SV;

[0149] SEQ ID NO: 78 is an amino acid sequence of a C. elegans GPCR of Str-243;

[0150] SEQ ID NO: 79 is an amino acid sequence of a C. elegans GPCR of Str-245;

[0151] SEQ ID NO: 80 is an amino acid sequence of a C. elegans GPCR of Str-246;

[0152] SEQ ID NO: 81 is an amino acid sequence of a C. elegans GPCR of Str-247;

[0153] SEQ ID NO: 82 is an amino acid sequence of a C. elegans GPCR of Str-248 SV;

[0154] SEQ ID NO: 83 is an amino acid sequence of a C. elegans GPCR of Str-25;

[0155] SEQ ID NO: 84 is an amino acid sequence of a C. elegans GPCR of Str-250;

[0156] SEQ ID NO: 85 is an amino acid sequence of a C. elegans GPCR of Str-252;

[0157] SEQ ID NO: 86 is an amino acid sequence of a C. elegans GPCR of Str-253;

[0158] SEQ ID NO: 87 is an amino acid sequence of a C. elegans GPCR of Str-256;

[0159] SEQ ID NO: 88 is an amino acid sequence of a C. elegans GPCR of Str-257;

[0160] SEQ ID NO: 89 is an amino acid sequence of a C. elegans GPCR of Str-258;

[0161] SEQ ID NO: 90 is an amino acid sequence of a C. elegans GPCR of Str-260;

[0162] SEQ ID NO: 91 is an amino acid sequence of a C. elegans GPCR of Str-261;

[0163] SEQ ID NO: 92 is an amino acid sequence of a C. elegans GPCR of Str-262;

[0164] SEQ ID NO: 93 is an amino acid sequence of a C. elegans GPCR of Str-264;

[0165] SEQ ID NO: 94 is an amino acid sequence of a C. elegans GPCR of Str-267;

[0166] SEQ ID NO: 95 is an amino acid sequence of a C. elegans GPCR of Str-27 SV;

[0167] SEQ ID NO: 96 is an amino acid sequence of a C. elegans GPCR of Str-3;

[0168] SEQ ID NO: 97 is an amino acid sequence of a C. elegans GPCR of Str-30;

[0169] SEQ ID NO: 98 is an amino acid sequence of a C. elegans GPCR of Str-31;

[0170] SEQ ID NO: 99 is an amino acid sequence of a C. elegans GPCR of Str-32;

[0171] SEQ ID NO: 100 is an amino acid sequence of a C. elegans GPCR of Str-37;

[0172] SEQ ID NO: 101 is an amino acid sequence of a C. elegans GPCR of Str-38;

[0173] SEQ ID NO: 102 is an amino acid sequence of a C. elegans GPCR of Str-4;

[0174] SEQ ID NO: 103 is an amino acid sequence of a C. elegans GPCR of Str-41;

[0175] SEQ ID NO: 104 is an amino acid sequence of a C. elegans GPCR of Str-44;

[0176] SEQ ID NO: 105 is an amino acid sequence of a C. elegans GPCR of Str-45;

[0177] SEQ ID NO: 106 is an amino acid sequence of a C. elegans GPCR of Str-46;

[0178] SEQ ID NO: 107 is an amino acid sequence of a C. elegans GPCR of Str-47;

[0179] SEQ ID NO: 108 is an amino acid sequence of a C. elegans GPCR of Str-5;

[0180] SEQ ID NO: 109 is an amino acid sequence of a C. elegans GPCR of Str-55;

[0181] SEQ ID NO: 110 is an amino acid sequence of a C. elegans GPCR of Str-56;

[0182] SEQ ID NO: 111 is an amino acid sequence of a C. elegans GPCR of Str-6;

[0183] SEQ ID NO: 112 is an amino acid sequence of a C. elegans GPCR of Str-63;

[0184] SEQ ID NO: 113 is an amino acid sequence of a C. elegans GPCR of Str-64;

[0185] SEQ ID NO: 114 is an amino acid sequence of a C. elegans GPCR of Str-66;

[0186] SEQ ID NO: 115 is an amino acid sequence of a C. elegans GPCR of Str-7;

[0187] SEQ ID NO: 116 is an amino acid sequence of a C. elegans GPCR of Str-71;

[0188] SEQ ID NO: 117 is an amino acid sequence of a C. elegans GPCR of Str-77;

[0189] SEQ ID NO: 118 is an amino acid sequence of a C. elegans GPCR of Str-78;

[0190] SEQ ID NO: 119 is an amino acid sequence of a C. elegans GPCR of Str-79 SV;

[0191] SEQ ID NO: 120 is an amino acid sequence of a C. elegans GPCR of Str-8 SV;

[0192] SEQ ID NO: 121 is an amino acid sequence of a C. elegans GPCR of Str-82;

[0193] SEQ ID NO: 122 is an amino acid sequence of a C. elegans GPCR of Str-84;

[0194] SEQ ID NO: 123 is an amino acid sequence of a C. elegans GPCR of Str-85;

[0195] SEQ ID NO: 124 is an amino acid sequence of a C. elegans GPCR of Str-87;

[0196] SEQ ID NO: 125 is an amino acid sequence of a C. elegans GPCR of Str-88;

[0197] SEQ ID NO: 126 is an amino acid sequence of a C. elegans GPCR of Str-89;

[0198] SEQ ID NO: 127 is an amino acid sequence of a C. elegans GPCR of Str-9;

[0199] SEQ ID NO: 128 is an amino acid sequence of a C. elegans GPCR of Str-90;

[0200] SEQ ID NO: 129 is an amino acid sequence of a C. elegans GPCR of Str-92;

[0201] SEQ ID NO: 130 is an amino acid sequence of a C. elegans GPCR of Str-93;

[0202] SEQ ID NO: 131 is an amino acid sequence of a C. elegans GPCR of Str-94;

[0203] SEQ ID NO: 132 is an amino acid sequence of a C. elegans GPCR of Str-96;

[0204] SEQ ID NO: 133 is an amino acid sequence of a C. elegans GPCR of Str-97;

[0205] SEQ ID NO: 134 is an amino acid sequence of a C. elegans GPCR of Str-99 SV;

[0206] SEQ ID NO: 135 is an amino acid sequence of a C. elegans GPCR of Srh-1;

[0207] SEQ ID NO: 136 is an amino acid sequence of a C. elegans GPCR of Srh-10;

[0208] SEQ ID NO: 137 is an amino acid sequence of a C. elegans GPCR of Srh-104;

[0209] SEQ ID NO: 138 is an amino acid sequence of a C. elegans GPCR of Srh-112;

[0210] SEQ ID NO: 139 is an amino acid sequence of a C. elegans GPCR of Srh-115-2;

[0211] SEQ ID NO: 140 is an amino acid sequence of a C. elegans GPCR of Srh-118;

[0212] SEQ ID NO: 141 is an amino acid sequence of a C. elegans GPCR of Srh-120;

[0213] SEQ ID NO: 142 is an amino acid sequence of a C. elegans GPCR of Srh-123;

[0214] SEQ ID NO: 143 is an amino acid sequence of a C. elegans GPCR of Srh-128;

[0215] SEQ ID NO: 144 is an amino acid sequence of a C. elegans GPCR of Srh-129;

[0216] SEQ ID NO: 145 is an amino acid sequence of a C. elegans GPCR of Srh-130;

[0217] SEQ ID NO: 146 is an amino acid sequence of a C. elegans GPCR of Srh-132;

[0218] SEQ ID NO: 147 is an amino acid sequence of a C. elegans GPCR of Srh-133;

[0219] SEQ ID NO: 148 is an amino acid sequence of a C. elegans GPCR of Srh-134;

[0220] SEQ ID NO: 149 is an amino acid sequence of a C. elegans GPCR of Srh-138;

[0221] SEQ ID NO: 150 is an amino acid sequence of a C. elegans GPCR of Srh-142;

[0222] SEQ ID NO: 151 is an amino acid sequence of a C. elegans GPCR of Srh-147;

[0223] SEQ ID NO: 152 is an amino acid sequence of a C. elegans GPCR of Srh-149;

[0224] SEQ ID NO: 153 is an amino acid sequence of a C. elegans GPCR of Srh-149-2;

[0225] SEQ ID NO: 154 is an amino acid sequence of a C. elegans GPCR of Srh-15;

[0226] SEQ ID NO: 155 is an amino acid sequence of a C. elegans GPCR of Srh-159;

[0227] SEQ ID NO: 156 is an amino acid sequence of a C. elegans GPCR of Srh-166;

[0228] SEQ ID NO: 157 is an amino acid sequence of a C. elegans GPCR of Srh-167;

[0229] SEQ ID NO: 158 is an amino acid sequence of a C. elegans GPCR of Srh-17;

[0230] SEQ ID NO: 159 is an amino acid sequence of a C. elegans GPCR of Srh-174;

[0231] SEQ ID NO: 160 is an amino acid sequence of a C. elegans GPCR of Srh-178;

[0232] SEQ ID NO: 161 is an amino acid sequence of a C. elegans GPCR of Srh-179;

[0233] SEQ ID NO: 162 is an amino acid sequence of a C. elegans GPCR of Srh-18;

[0234] SEQ ID NO: 163 is an amino acid sequence of a C. elegans GPCR of Srh-182;

[0235] SEQ ID NO: 164 is an amino acid sequence of a C. elegans GPCR of Srh-183;

[0236] SEQ ID NO: 165 is an amino acid sequence of a C. elegans GPCR of Srh-184;

[0237] SEQ ID NO: 166 is an amino acid sequence of a C. elegans GPCR of Srh-190;

[0238] SEQ ID NO: 167 is an amino acid sequence of a C. elegans GPCR of Srh-192;

[0239] SEQ ID NO: 168 is an amino acid sequence of a C. elegans GPCR of Srh-193;

[0240] SEQ ID NO: 169 is an amino acid sequence of a C. elegans GPCR of Srh-195;

[0241] SEQ ID NO: 170 is an amino acid sequence of a C. elegans GPCR of Srh-199;

[0242] SEQ ID NO: 171 is an amino acid sequence of a C. elegans GPCR of Srh-2;

[0243] SEQ ID NO: 172 is an amino acid sequence of a C. elegans GPCR of Srh-201;

[0244] SEQ ID NO: 173 is an amino acid sequence of a C. elegans GPCR of Srh-207;

[0245] SEQ ID NO: 174 is an amino acid sequence of a C. elegans GPCR of Srh-208;

[0246] SEQ ID NO: 175 is an amino acid sequence of a C. elegans GPCR of Srh-209;

[0247] SEQ ID NO: 176 is an amino acid sequence of a C. elegans GPCR of Srh-21;

[0248] SEQ ID NO: 177 is an amino acid sequence of a C. elegans GPCR of Srh-211;

[0249] SEQ ID NO: 178 is an amino acid sequence of a C. elegans GPCR of Srh-212;

[0250] SEQ ID NO: 179 is an amino acid sequence of a C. elegans GPCR of Srh-213;

[0251] SEQ ID NO: 180 is an amino acid sequence of a C. elegans GPCR of Srh-214;

[0252] SEQ ID NO: 181 is an amino acid sequence of a C. elegans GPCR of Srh-215;

[0253] SEQ ID NO: 182 is an amino acid sequence of a C. elegans GPCR of Srh-218;

[0254] SEQ ID NO: 183 is an amino acid sequence of a C. elegans GPCR of Srh-233;

[0255] SEQ ID NO: 184 is an amino acid sequence of a C. elegans GPCR of Srh-234;

[0256] SEQ ID NO: 185 is an amino acid sequence of a C. elegans GPCR of Srh-235;

[0257] SEQ ID NO: 186 is an amino acid sequence of a C. elegans GPCR of Srh-239;

[0258] SEQ ID NO: 187 is an amino acid sequence of a C. elegans GPCR of Srh-24;

[0259] SEQ ID NO: 188 is an amino acid sequence of a C. elegans GPCR of Srh-241;

[0260] SEQ ID NO: 189 is an amino acid sequence of a C. elegans GPCR of Srh-255;

[0261] SEQ ID NO: 190 is an amino acid sequence of a C. elegans GPCR of Srh-269;

[0262] SEQ ID NO: 191 is an amino acid sequence of a C. elegans GPCR of Srh-270;

[0263] SEQ ID NO: 192 is an amino acid sequence of a C. elegans GPCR of Srh-271;

[0264] SEQ ID NO: 193 is an amino acid sequence of a C. elegans GPCR of Srh-275;

[0265] SEQ ID NO: 194 is an amino acid sequence of a C. elegans GPCR of Srh-276;

[0266] SEQ ID NO: 195 is an amino acid sequence of a C. elegans GPCR of Srh-277;

[0267] SEQ ID NO: 196 is an amino acid sequence of a C. elegans GPCR of Srh-278;

[0268] SEQ ID NO: 197 is an amino acid sequence of a C. elegans GPCR of Srh-279;

[0269] SEQ ID NO: 198 is an amino acid sequence of a C. elegans GPCR of Srh-281;

[0270] SEQ ID NO: 199 is an amino acid sequence of a C. elegans GPCR of Srh-282;

[0271] SEQ ID NO: 200 is an amino acid sequence of a C. elegans GPCR of Srh-296;

[0272] SEQ ID NO: 201 is an amino acid sequence of a C. elegans GPCR of Srh-30;

[0273] SEQ ID NO: 202 is an amino acid sequence of a C. elegans GPCR of Srh-31;

[0274] SEQ ID NO: 203 is an amino acid sequence of a C. elegans GPCR of Srh-33;

[0275] SEQ ID NO: 204 is an amino acid sequence of a C. elegans GPCR of Srh-37;

[0276] SEQ ID NO: 205 is an amino acid sequence of a C. elegans GPCR of Srh-46;

[0277] SEQ ID NO: 206 is an amino acid sequence of a C. elegans GPCR of Srh-48;

[0278] SEQ ID NO: 207 is an amino acid sequence of a C. elegans GPCR of Srh-50;

[0279] SEQ ID NO: 208 is an amino acid sequence of a C. elegans GPCR of Sri-1;

[0280] SEQ ID NO: 209 is an amino acid sequence of a C. elegans GPCR of Sri-2;

[0281] SEQ ID NO: 210 is an amino acid sequence of a C. elegans GPCR of Sri-7;

[0282] SEQ ID NO: 211 is an amino acid sequence of a C. elegans GPCR of Sri-10;

[0283] SEQ ID NO: 212 is an amino acid sequence of a C. elegans GPCR of Sri-20;

[0284] SEQ ID NO: 213 is an amino acid sequence of a C. elegans GPCR of Sri-21;

[0285] SEQ ID NO: 214 is an amino acid sequence of a C. elegans GPCR of Sri-25;

[0286] SEQ ID NO: 215 is an amino acid sequence of a C. elegans GPCR of Sri-28;

[0287] SEQ ID NO: 216 is an amino acid sequence of a C. elegans GPCR of Sri-29;

[0288] SEQ ID NO: 217 is an amino acid sequence of a C. elegans GPCR of Sri-30;

[0289] SEQ ID NO: 218 is an amino acid sequence of a C. elegans GPCR of Sri-31;

[0290] SEQ ID NO: 219 is an amino acid sequence of a C. elegans GPCR of Sri-38;

[0291] SEQ ID NO: 220 is an amino acid sequence of a C. elegans GPCR of Sri-42;

[0292] SEQ ID NO: 221 is an amino acid sequence of a C. elegans GPCR of Sri-43;

[0293] SEQ ID NO: 222 is an amino acid sequence of a C. elegans GPCR of Sri-46;

[0294] SEQ ID NO: 223 is an amino acid sequence of a C. elegans GPCR of Sri-48;

[0295] SEQ ID NO: 224 is an amino acid sequence of a C. elegans GPCR of Sri-51;

[0296] SEQ ID NO: 225 is an amino acid sequence of a C. elegans GPCR of Sri-54;

[0297] SEQ ID NO: 226 is an amino acid sequence of a C. elegans GPCR of Sri-57;

[0298] SEQ ID NO: 227 is an amino acid sequence of a C. elegans GPCR of Sri-60;

[0299] SEQ ID NO: 228 is an amino acid sequence of a C. elegans GPCR of Sri-63;

[0300] SEQ ID NO: 229 is an amino acid sequence of a C. elegans GPCR of Sri-66;

[0301] SEQ ID NO: 230 is an amino acid sequence of a C. elegans GPCR of Sri-70;

[0302] SEQ ID NO: 231 is an amino acid sequence of a C. elegans GPCR of Sri-73;

[0303] SEQ ID NO: 232 is an amino acid sequence of a C. elegans GPCR of Sri-77;

[0304] SEQ ID NO: 233 is an amino acid sequence of a C. elegans GPCR of Srd-1;

[0305] SEQ ID NO: 234 is an amino acid sequence of a C. elegans GPCR of Srd-3;

[0306] SEQ ID NO: 235 is an amino acid sequence of a C. elegans GPCR of Srd-5;

[0307] SEQ ID NO: 236 is an amino acid sequence of a C. elegans GPCR of Srd-9;

[0308] SEQ ID NO: 237 is an amino acid sequence of a C. elegans GPCR of Srd-10;

[0309] SEQ ID NO: 238 is an amino acid sequence of a C. elegans GPCR of Srd-11;

[0310] SEQ ID NO: 239 is an amino acid sequence of a C. elegans GPCR of Srd-12;

[0311] SEQ ID NO: 240 is an amino acid sequence of a C. elegans GPCR of Srd-13;

[0312] SEQ ID NO: 241 is an amino acid sequence of a C. elegans GPCR of Srd-15;

[0313] SEQ ID NO: 242 is an amino acid sequence of a C. elegans GPCR of Srd-16;

[0314] SEQ ID NO: 243 is an amino acid sequence of a C. elegans GPCR of Srd-17;

[0315] SEQ ID NO: 244 is an amino acid sequence of a C. elegans GPCR of Srd-18;

[0316] SEQ ID NO: 245 is an amino acid sequence of a C. elegans GPCR of Srd-19;

[0317] SEQ ID NO: 246 is an amino acid sequence of a C. elegans GPCR of Srd-20;

[0318] SEQ ID NO: 247 is an amino acid sequence of a C. elegans GPCR of Srd-23;

[0319] SEQ ID NO: 248 is an amino acid sequence of a C. elegans GPCR of Srd-26;

[0320] SEQ ID NO: 249 is an amino acid sequence of a C. elegans GPCR of Srd-27;

[0321] SEQ ID NO: 250 is an amino acid sequence of a C. elegans GPCR of Srd-30;

[0322] SEQ ID NO: 251 is an amino acid sequence of a C. elegans GPCR of Srd-32;

[0323] SEQ ID NO: 252 is an amino acid sequence of a C. elegans GPCR of Srd-33;

[0324] SEQ ID NO: 253 is an amino acid sequence of a C. elegans GPCR of Srd-38;

[0325] SEQ ID NO: 254 is an amino acid sequence of a C. elegans GPCR of Srd-39 SV;

[0326] SEQ ID NO: 255 is an amino acid sequence of a C. elegans GPCR of Srd-40 SV;

[0327] SEQ ID NO: 256 is an amino acid sequence of a C. elegans GPCR of Srd-41;

[0328] SEQ ID NO: 257 is an amino acid sequence of a C. elegans GPCR of Srd-42;

[0329] SEQ ID NO: 258 is an amino acid sequence of a C. elegans GPCR of Srd-43 SV;

[0330] SEQ ID NO: 259 is an amino acid sequence of a C. elegans GPCR of Srd-45;

[0331] SEQ ID NO: 260 is an amino acid sequence of a C. elegans GPCR of Srd-49;

[0332] SEQ ID NO: 261 is an amino acid sequence of a C. elegans GPCR of Srd-50 SV;

[0333] SEQ ID NO: 262 is an amino acid sequence of a C. elegans GPCR of Srd-51;

[0334] SEQ ID NO: 263 is an amino acid sequence of a C. elegans GPCR of Srd-53;

[0335] SEQ ID NO: 264 is an amino acid sequence of a C. elegans GPCR of Srd-55;

[0336] SEQ ID NO: 265 is an amino acid sequence of a C. elegans GPCR of Srd-59;

[0337] SEQ ID NO: 266 is an amino acid sequence of a C. elegans GPCR of Srd-60;

[0338] SEQ ID NO: 267 is an amino acid sequence of a C. elegans GPCR of Srd-61;

[0339] SEQ ID NO: 268 is an amino acid sequence of a C. elegans GPCR of Srd-63;

[0340] SEQ ID NO: 269 is an amino acid sequence of a C. elegans GPCR of Srd-64;

[0341] SEQ ID NO: 270 is an amino acid sequence of a C. elegans GPCR of Srd-65;

[0342] SEQ ID NO: 271 is an amino acid sequence of a C. elegans GPCR of Srd-66;

[0343] SEQ ID NO: 272 is an amino acid sequence of a C. elegans GPCR of Srd-67;

[0344] SEQ ID NO: 273 is an amino acid sequence of a C. elegans GPCR of Srd-71;

[0345] SEQ ID NO: 274 is an amino acid sequence of a C. elegans GPCR of Srd-72;

[0346] SEQ ID NO: 275 is an amino acid sequence of a C. elegans GPCR of Srd-74;

[0347] SEQ ID NO: 276 is an amino acid sequence of a C. elegans GPCR of Srj-1;

[0348] SEQ ID NO: 277 is an amino acid sequence of a C. elegans GPCR of Srj-4;

[0349] SEQ ID NO: 278 is an amino acid sequence of a C. elegans GPCR of Srj-5;

[0350] SEQ ID NO: 279 is an amino acid sequence of a C. elegans GPCR of Srj-6;

[0351] SEQ ID NO: 280 is an amino acid sequence of a C. elegans GPCR of Srj-7;

[0352] SEQ ID NO: 281 is an amino acid sequence of a C. elegans GPCR of Srj-8;

[0353] SEQ ID NO: 282 is an amino acid sequence of a C. elegans GPCR of Srj-9;

[0354] SEQ ID NO: 283 is an amino acid sequence of a C. elegans GPCR of Srj-11;

[0355] SEQ ID NO: 284 is an amino acid sequence of a C. elegans GPCR of Srj-14;

[0356] SEQ ID NO: 285 is an amino acid sequence of a C. elegans GPCR of Srj-15;

[0357] SEQ ID NO: 286 is an amino acid sequence of a C. elegans GPCR of Srj-19;

[0358] SEQ ID NO: 287 is an amino acid sequence of a C. elegans GPCR of Srj-22;

[0359] SEQ ID NO: 288 is an amino acid sequence of a C. elegans GPCR of Srj-26;

[0360] SEQ ID NO: 289 is an amino acid sequence of a C. elegans GPCR of Srj-27;

[0361] SEQ ID NO: 290 is an amino acid sequence of a C. elegans GPCR of Srj-37;

[0362] SEQ ID NO: 291 is an amino acid sequence of a C. elegans GPCR of Srj-39;

[0363] SEQ ID NO: 292 is an amino acid sequence of a C. elegans GPCR of Srj-44;

[0364] SEQ ID NO: 293 is an amino acid sequence of a C. elegans GPCR of Srm-1;

[0365] SEQ ID NO: 294 is an amino acid sequence of a C. elegans GPCR of Srm-2;

[0366] SEQ ID NO: 295 is an amino acid sequence of a C. elegans GPCR of Srm-3;

[0367] SEQ ID NO: 296 is an amino acid sequence of a C. elegans GPCR of Srm-4;

[0368] SEQ ID NO: 297 is an amino acid sequence of a C. elegans GPCR of Srm-5;

[0369] SEQ ID NO: 298 is an amino acid sequence of an artificial chimeric G protein of Gpa1/Odr3;

[0370] SEQ ID NO: 299 is an amino acid sequence of an artificial chimeric G protein of Gpa1/Gpa3;

[0371] SEQ ID NO: 300 is an amino acid sequence of an artificial chimeric G protein of Gpa1/Gpa13;

[0372] SEQ ID NO: 301 is an amino acid sequence of an artificial chimeric G protein of Gpa1/Gpa2;

[0373] SEQ ID NO: 302 is an amino acid sequence of an artificial chimeric G protein of Gpa1/Gpa5;

[0374] SEQ ID NO: 303 is an amino acid sequence of an artificial chimeric G protein of Gpa1/Gpa6;

[0375] SEQ ID NO: 304 is a nucleotide sequence of an artificial chimeric G protein of Gpa1/Odr3;

[0376] SEQ ID NO: 305 is a nucleotide sequence of an artificial chimeric G protein of Gpa1/Gpa3;

[0377] SEQ ID NO: 306 is a nucleotide sequence of an artificial chimeric G protein of Gpa1/Gpa13;

[0378] SEQ ID NO: 307 is a nucleotide sequence of an artificial chimeric G protein of Gpa1/Gpa2;

[0379] SEQ ID NO: 308 is a nucleotide sequence of an artificial chimeric G protein of Gpa1/Gpa5;

[0380] SEQ ID NO: 309 is a nucleotide sequence of an artificial chimeric G protein of Gpa1/Gpa6;

[0381] SEQ ID NO: 310 is a nucleotide sequence of a C. elegans GPCR of Srn-1;

[0382] SEQ ID NO: 311 is a nucleotide sequence of a C. elegans GPCR of Str-1;

[0383] SEQ ID NO: 312 is a nucleotide sequence of a C. elegans GPCR of Str-102;

[0384] SEQ ID NO: 313 is a nucleotide sequence of a C. elegans GPCR of Str-108;

[0385] SEQ ID NO: 314 is a nucleotide sequence of a C. elegans GPCR of Str-111;

[0386] SEQ ID NO: 315 is a nucleotide sequence of a C. elegans GPCR of Str-112;

[0387] SEQ ID NO: 316 is a nucleotide sequence of a C. elegans GPCR of Str-113;

[0388] SEQ ID NO: 317 is a nucleotide sequence of a C. elegans GPCR of Str-114;

[0389] SEQ ID NO: 318 is a nucleotide sequence of a C. elegans GPCR of Str-114 SV;

[0390] SEQ ID NO: 319 is a nucleotide sequence of a C. elegans GPCR of Str-12;

[0391] SEQ ID NO: 320 is a nucleotide sequence of a C. elegans GPCR of Str-120;

[0392] SEQ ID NO: 321 is a nucleotide sequence of a C. elegans GPCR of Str-120 SV;

[0393] SEQ ID NO: 322 is a nucleotide sequence of a C. elegans GPCR of Str-123;

[0394] SEQ ID NO: 323 is a nucleotide sequence of a C. elegans GPCR of Str-124;

[0395] SEQ ID NO: 324 is a nucleotide sequence of a C. elegans GPCR of Str-125;

[0396] SEQ ID NO: 325 is a nucleotide sequence of a C. elegans GPCR of Str-129;

[0397] SEQ ID NO: 326 is a nucleotide sequence of a C. elegans GPCR of Str-13;

[0398] SEQ ID NO: 327 is a nucleotide sequence of a C. elegans GPCR of Str-130;

[0399] SEQ ID NO: 328 is a nucleotide sequence of a C. elegans GPCR of Str-131;

[0400] SEQ ID NO: 329 is a nucleotide sequence of a C. elegans GPCR of Str-134 V;

[0401] SEQ ID NO: 330 is a nucleotide sequence of a C. elegans GPCR of Str-135;

[0402] SEQ ID NO: 331 is a nucleotide sequence of a C. elegans GPCR of Str-139;

[0403] SEQ ID NO: 332 is a nucleotide sequence of a C. elegans GPCR of Str-14;

[0404] SEQ ID NO: 333 is a nucleotide sequence of a C. elegans GPCR of Str-141;

[0405] SEQ ID NO: 334 is a nucleotide sequence of a C. elegans GPCR of Str-143;

[0406] SEQ ID NO: 335 is a nucleotide sequence of a C. elegans GPCR of Str-144;

[0407] SEQ ID NO: 336 is a nucleotide sequence of a C. elegans GPCR of Str-146;

[0408] SEQ ID NO: 337 is a nucleotide sequence of a C. elegans GPCR of Str-148;

[0409] SEQ ID NO: 338 is a nucleotide sequence of a C. elegans GPCR of Str-151;

[0410] SEQ ID NO: 339 is a nucleotide sequence of a C. elegans GPCR of Str-153;

[0411] SEQ ID NO: 340 is a nucleotide sequence of a C. elegans GPCR of Str-155;

[0412] SEQ ID NO: 341 is a nucleotide sequence of a C. elegans GPCR of Str-159;

[0413] SEQ ID NO: 342 is a nucleotide sequence of a C. elegans GPCR of Str-162;

[0414] SEQ ID NO: 343 is a nucleotide sequence of a C. elegans GPCR of Str-163;

[0415] SEQ ID NO: 344 is a nucleotide sequence of a C. elegans GPCR of Str-164;

[0416] SEQ ID NO: 345 is a nucleotide sequence of a C. elegans GPCR of Str-165;

[0417] SEQ ID NO: 346 is a nucleotide sequence of a C. elegans GPCR of Str-166;

[0418] SEQ ID NO: 347 is a nucleotide sequence of a C. elegans GPCR of Str-168;

[0419] SEQ ID NO: 348 is a nucleotide sequence of a C. elegans GPCR of Str-169a;

[0420] SEQ ID NO: 349 is a nucleotide sequence of a C. elegans GPCR of Str-170;

[0421] SEQ ID NO: 350 is a nucleotide sequence of a C. elegans GPCR of Str-171;

[0422] SEQ ID NO: 351 is a nucleotide acid sequence of a C. elegans GPCR of Str-172;

[0423] SEQ ID NO: 352 is a nucleotide sequence of a C. elegans GPCR of Str-173;

[0424] SEQ ID NO: 353 is a nucleotide sequence of a C. elegans GPCR of Str-174a;

[0425] SEQ ID NO: 354 is a nucleotide sequence of a C. elegans GPCR of Str-174 SV;

[0426] SEQ ID NO: 355 is a nucleotide sequence of a C. elegans GPCR of Str-177;

[0427] SEQ ID NO: 356 is a nucleotide sequence of a C. elegans GPCR of Str-178;

[0428] SEQ ID NO: 357 is a nucleotide sequence of a C. elegans GPCR of Str-180a;

[0429] SEQ ID NO: 358 is a nucleotide sequence of a C. elegans GPCR of Str-180b;

[0430] SEQ ID NO: 359 is a nucleotide sequence of a C. elegans GPCR of Str-181;

[0431] SEQ ID NO: 360 is a nucleotide sequence of a C. elegans GPCR of Str-182;

[0432] SEQ ID NO: 361 is a nucleotide sequence of a C. elegans GPCR of Str-183;

[0433] SEQ ID NO: 362 is a nucleotide sequence of a C. elegans GPCR of Str-185;

[0434] SEQ ID NO: 363 is a nucleotide sequence of a C. elegans GPCR of Str-19;

[0435] SEQ ID NO: 364 is a nucleotide sequence of a C. elegans GPCR of Str-190;

[0436] SEQ ID NO: 365 is a nucleotide sequence of a C. elegans GPCR of Str-193;

[0437] SEQ ID NO: 366 is a nucleotide sequence of a C. elegans GPCR of Str-198;

[0438] SEQ ID NO: 367 is a nucleotide sequence of a C. elegans GPCR of Str-2;

[0439] SEQ ID NO: 368 is a nucleotide sequence of a C. elegans GPCR of Str-20;

[0440] SEQ ID NO: 369 is a nucleotide sequence of a C. elegans GPCR of Str-20 SV;

[0441] SEQ ID NO: 370 is a nucleotide sequence of a C. elegans GPCR of Str-204;

[0442] SEQ ID NO: 371 is a nucleotide sequence of a C. elegans GPCR of Str-205;

[0443] SEQ ID NO: 372 is a nucleotide sequence of a C. elegans GPCR of Str-207;

[0444] SEQ ID NO: 373 is a nucleotide sequence of a C. elegans GPCR of Str-211;

[0445] SEQ ID NO: 374 is a nucleotide sequence of a C. elegans GPCR of Str-214;

[0446] SEQ ID NO: 375 is a nucleotide sequence of a C. elegans GPCR of Str-220 SV;

[0447] SEQ ID NO: 376 is a nucleotide sequence of a C. elegans GPCR of Str-221;

[0448] SEQ ID NO: 377 is a nucleotide sequence of a C. elegans GPCR of Str-222;

[0449] SEQ ID NO: 378 is a nucleotide sequence of a C. elegans GPCR of Str-224 SV;

[0450] SEQ ID NO: 379 is a nucleotide sequence of a C. elegans GPCR of Str-225;

[0451] SEQ ID NO: 380 is a nucleotide sequence of a C. elegans GPCR of Str-227;

[0452] SEQ ID NO: 381 is a nucleotide sequence of a C. elegans GPCR of Str-229;

[0453] SEQ ID NO: 382 is a nucleotide sequence of a C. elegans GPCR of Str-23;

[0454] SEQ ID NO: 383 is a nucleotide sequence of a C. elegans GPCR of Str-230;

[0455] SEQ ID NO: 384 is a nucleotide sequence of a C. elegans GPCR of Str-231;

[0456] SEQ ID NO: 385 is a nucleotide sequence of a C. elegans GPCR of Str-232;

[0457] SEQ ID NO: 386 is a nucleotide sequence of a C. elegans GPCR of Str-233 SV;

[0458] SEQ ID NO: 387 is a nucleotide sequence of a C. elegans GPCR of Str-243;

[0459] SEQ ID NO: 388 is a nucleotide sequence of a C. elegans GPCR of Str-245;

[0460] SEQ ID NO: 389 is a nucleotide sequence of a C. elegans GPCR of Str-246;

[0461] SEQ ID NO: 390 is a nucleotide sequence of a C. elegans GPCR of Str-247;

[0462] SEQ ID NO: 391 is a nucleotide sequence of a C. elegans GPCR of Str-248 SV;

[0463] SEQ ID NO: 392 is a nucleotide sequence of a C. elegans GPCR of Str-25;

[0464] SEQ ID NO: 393 is a nucleotide sequence of a C. elegans GPCR of Str-250;

[0465] SEQ ID NO: 394 is a nucleotide sequence of a C. elegans GPCR of Str-252;

[0466] SEQ ID NO: 395 is a nucleotide sequence of a C. elegans GPCR of Str-253;

[0467] SEQ ID NO: 396 is a nucleotide sequence of a C. elegans GPCR of Str-256;

[0468] SEQ ID NO: 397 is a nucleotide sequence of a C. elegans GPCR of Str-257;

[0469] SEQ ID NO: 398 is a nucleotide sequence of a C. elegans GPCR of Str-258;

[0470] SEQ ID NO: 399 is a nucleotide sequence of a C. elegans GPCR of Str-260;

[0471] SEQ ID NO: 400 is a nucleotide sequence of a C. elegans GPCR of Str-261;

[0472] SEQ ID NO: 401 is a nucleotide sequence of a C. elegans GPCR of Str-262;

[0473] SEQ ID NO: 402 is a nucleotide sequence of a C. elegans GPCR of Str-264;

[0474] SEQ ID NO: 403 is a nucleotide sequence of a C. elegans GPCR of Str-267;

[0475] SEQ ID NO: 404 is a nucleotide sequence of a C. elegans GPCR of Str-27 SV;

[0476] SEQ ID NO: 405 is a nucleotide sequence of a C. elegans GPCR of Str-3;

[0477] SEQ ID NO: 406 is a nucleotide sequence of a C. elegans GPCR of Str-30;

[0478] SEQ ID NO: 407 is a nucleotide sequence of a C. elegans GPCR of Str-31;

[0479] SEQ ID NO: 408 is a nucleotide sequence of a C. elegans GPCR of Str-32;

[0480] SEQ ID NO: 409 is a nucleotide sequence of a C. elegans GPCR of Str-37;

[0481] SEQ ID NO: 410 is a nucleotide sequence of a C. elegans GPCR of Str-38;

[0482] SEQ ID NO: 411 is a nucleotide sequence of a C. elegans GPCR of Str-4;

[0483] SEQ ID NO: 412 is a nucleotide sequence of a C. elegans GPCR of Str-41;

[0484] SEQ ID NO: 413 is a nucleotide sequence of a C. elegans GPCR of Str-44;

[0485] SEQ ID NO: 414 is a nucleotide sequence of a C. elegans GPCR of Str-45;

[0486] SEQ ID NO: 415 is a nucleotide sequence of a C. elegans GPCR of Str-46;

[0487] SEQ ID NO: 416 is a nucleotide sequence of a C. elegans GPCR of Str-47;

[0488] SEQ ID NO: 417 is a nucleotide sequence of a C. elegans GPCR of Str-5;

[0489] SEQ ID NO: 418 is a nucleotide sequence of a C. elegans GPCR of Str-55;

[0490] SEQ ID NO: 419 is a nucleotide sequence of a C. elegans GPCR of Str-56;

[0491] SEQ ID NO: 420 is a nucleotide sequence of a C. elegans GPCR of Str-6;

[0492] SEQ ID NO: 421 is a nucleotide sequence of a C. elegans GPCR of Str-63;

[0493] SEQ ID NO: 422 is a nucleotide sequence of a C. elegans GPCR of Str-64;

[0494] SEQ ID NO: 423 is a nucleotide sequence of a C. elegans GPCR of Str-66;

[0495] SEQ ID NO: 424 is a nucleotide sequence of a C. elegans GPCR of Str-7;

[0496] SEQ ID NO: 425 is a nucleotide sequence of a C. elegans GPCR of Str-71;

[0497] SEQ ID NO: 426 is a nucleotide sequence of a C. elegans GPCR of Str-77;

[0498] SEQ ID NO: 427 is a nucleotide sequence of a C. elegans GPCR of Str-78;

[0499] SEQ ID NO: 428 is a nucleotide sequence of a C. elegans GPCR of Str-79 SV;

[0500] SEQ ID NO: 429 is a nucleotide sequence of a C. elegans GPCR of Str-8 SV;

[0501] SEQ ID NO: 430 is a nucleotide sequence of a C. elegans GPCR of Str-82;

[0502] SEQ ID NO: 431 is a nucleotide sequence of a C. elegans GPCR of Str-84;

[0503] SEQ ID NO: 432 is a nucleotide sequence of a C. elegans GPCR of Str-85;

[0504] SEQ ID NO: 433 is a nucleotide sequence of a C. elegans GPCR of Str-87;

[0505] SEQ ID NO: 434 is a nucleotide sequence of a C. elegans GPCR of Str-88;

[0506] SEQ ID NO: 435 is a nucleotide sequence of a C. elegans GPCR of Str-89;

[0507] SEQ ID NO: 436 is a nucleotide sequence of a C. elegans GPCR of Str-9;

[0508] SEQ ID NO: 437 is a nucleotide sequence of a C. elegans GPCR of Str-90;

[0509] SEQ ID NO: 438 is a nucleotide sequence of a C. elegans GPCR of Str-92;

[0510] SEQ ID NO: 439 is a nucleotide sequence of a C. elegans GPCR of Str-93;

[0511] SEQ ID NO: 440 is a nucleotide sequence of a C. elegans GPCR of Str-94;

[0512] SEQ ID NO: 441 is a nucleotide sequence of a C. elegans GPCR of Str-96;

[0513] SEQ ID NO: 442 is a nucleotide sequence of a C. elegans GPCR of Str-97;

[0514] SEQ ID NO: 443 is a nucleotide sequence of a C. elegans GPCR of Str-99 SV;

[0515] SEQ ID NO: 444 is a nucleotide sequence of a C. elegans GPCR of Srh-1;

[0516] SEQ ID NO: 445 is a nucleotide sequence of a C. elegans GPCR of Srh-10;

[0517] SEQ ID NO: 446 is a nucleotide sequence of a C. elegans GPCR of Srh-104;

[0518] SEQ ID NO: 447 is a nucleotide sequence of a C. elegans GPCR of Srh-112;

[0519] SEQ ID NO: 448 is a nucleotide sequence of a C. elegans GPCR of Srh-115-2;

[0520] SEQ ID NO: 449 is a nucleotide sequence of a C. elegans GPCR of Srh-118;

[0521] SEQ ID NO: 450 is a nucleotide sequence of a C. elegans GPCR of Srh-120;

[0522] SEQ ID NO: 451 is a nucleotide sequence of a C. elegans GPCR of Srh-123;

[0523] SEQ ID NO: 452 is a nucleotide sequence of a C. elegans GPCR of Srh-128;

[0524] SEQ ID NO: 453 is a nucleotide sequence of a C. elegans GPCR of Srh-129;

[0525] SEQ ID NO: 454 is a nucleotide sequence of a C. elegans GPCR of Srh-130;

[0526] SEQ ID NO: 455 is a nucleotide sequence of a C. elegans GPCR of Srh-132;

[0527] SEQ ID NO: 456 is a nucleotide sequence of a C. elegans GPCR of Srh-133;

[0528] SEQ ID NO: 457 is a nucleotide sequence of a C. elegans GPCR of Srh-134;

[0529] SEQ ID NO: 458 is a nucleotide sequence of a C. elegans GPCR of Srh-138;

[0530] SEQ ID NO: 459 is a nucleotide sequence of a C. elegans GPCR of Srh-142;

[0531] SEQ ID NO: 460 is a nucleotide sequence of a C. elegans GPCR of Srh-147;

[0532] SEQ ID NO: 461 is a nucleotide sequence of a C. elegans GPCR of Srh-149;

[0533] SEQ ID NO: 462 is a nucleotide sequence of a C. elegans GPCR of Srh-149-2;

[0534] SEQ ID NO: 463 is a nucleotide sequence of a C. elegans GPCR of Srh-15;

[0535] SEQ ID NO: 464 is a nucleotide sequence of a C. elegans GPCR of Srh-159;

[0536] SEQ ID NO: 465 is a nucleotide sequence of a C. elegans GPCR of Srh-166;

[0537] SEQ ID NO: 466 is a nucleotide sequence of a C. elegans GPCR of Srh-167;

[0538] SEQ ID NO: 467 is a nucleotide sequence of a C. elegans GPCR of Srh-17;

[0539] SEQ ID NO: 468 is a nucleotide sequence of a C. elegans GPCR of Srh-174;

[0540] SEQ ID NO: 469 is a nucleotide sequence of a C. elegans GPCR of Srh-178;

[0541] SEQ ID NO: 470 is a nucleotide sequence of a C. elegans GPCR of Srh-179;

[0542] SEQ ID NO: 471 is a nucleotide sequence of a C. elegans GPCR of Srh-18;

[0543] SEQ ID NO: 472 is a nucleotide sequence of a C. elegans GPCR of Srh-182;

[0544] SEQ ID NO: 473 is a nucleotide sequence of a C. elegans GPCR of Srh-183;

[0545] SEQ ID NO: 474 is a nucleotide sequence of a C. elegans GPCR of Srh-184;

[0546] SEQ ID NO: 475 is a nucleotide sequence of a C. elegans GPCR of Srh-190;

[0547] SEQ ID NO: 476 is a nucleotide sequence of a C. elegans GPCR of Srh-192;

[0548] SEQ ID NO: 477 is a nucleotide sequence of a C. elegans GPCR of Srh-193;

[0549] SEQ ID NO: 478 is a nucleotide sequence of a C. elegans GPCR of Srh-195;

[0550] SEQ ID NO: 479 is a nucleotide sequence of a C. elegans GPCR of Srh-199;

[0551] SEQ ID NO: 480 is a nucleotide sequence of a C. elegans GPCR of Srh-2;

[0552] SEQ ID NO: 481 is a nucleotide sequence of a C. elegans GPCR of Srh-201;

[0553] SEQ ID NO: 482 is a nucleotide sequence of a C. elegans GPCR of Srh-207;

[0554] SEQ ID NO: 483 is a nucleotide sequence of a C. elegans GPCR of Srh-208;

[0555] SEQ ID NO: 484 is a nucleotide sequence of a C. elegans GPCR of Srh-209;

[0556] SEQ ID NO: 485 is a nucleotide sequence of a C. elegans GPCR of Srh-21;

[0557] SEQ ID NO: 486 is a nucleotide sequence of a C. elegans GPCR of Srh-211;

[0558] SEQ ID NO: 487 is a nucleotide sequence of a C. elegans GPCR of Srh-212;

[0559] SEQ ID NO: 488 is a nucleotide sequence of a C. elegans GPCR of Srh-213;

[0560] SEQ ID NO: 489 is a nucleotide sequence of a C. elegans GPCR of Srh-214;

[0561] SEQ ID NO: 490 is a nucleotide sequence of a C. elegans GPCR of Srh-215;

[0562] SEQ ID NO: 491 is a nucleotide sequence of a C. elegans GPCR of Srh-218;

[0563] SEQ ID NO: 492 is a nucleotide sequence of a C. elegans GPCR of Srh-233;

[0564] SEQ ID NO: 493 is a nucleotide sequence of a C. elegans GPCR of Srh-234;

[0565] SEQ ID NO: 494 is a nucleotide sequence of a C. elegans GPCR of Srh-235;

[0566] SEQ ID NO: 495 is a nucleotide sequence of a C. elegans GPCR of Srh-239;

[0567] SEQ ID NO: 496 is a nucleotide sequence of a C. elegans GPCR of Srh-24;

[0568] SEQ ID NO: 497 is a nucleotide sequence of a C. elegans GPCR of Srh-241;

[0569] SEQ ID NO: 498 is a nucleotide sequence of a C. elegans GPCR of Srh-255;

[0570] SEQ ID NO: 499 is a nucleotide sequence of a C. elegans GPCR of Srh-269;

[0571] SEQ ID NO: 500 is a nucleotide sequence of a C. elegans GPCR of Srh-270;

[0572] SEQ ID NO: 501 is a nucleotide sequence of a C. elegans GPCR of Srh-271;

[0573] SEQ ID NO: 502 is a nucleotide sequence of a C. elegans GPCR of Srh-275;

[0574] SEQ ID NO: 503 is a nucleotide sequence of a C. elegans GPCR of Srh-276;

[0575] SEQ ID NO: 504 is a nucleotide sequence of a C. elegans GPCR of Srh-277;

[0576] SEQ ID NO: 505 is a nucleotide sequence of a C. elegans GPCR of Srh-278;

[0577] SEQ ID NO: 506 is a nucleotide sequence of a C. elegans GPCR of Srh-279;

[0578] SEQ ID NO: 507 is a nucleotide sequence of a C. elegans GPCR of Srh-281;

[0579] SEQ ID NO: 508 is a nucleotide sequence of a C. elegans GPCR of Srh-282;

[0580] SEQ ID NO: 509 is a nucleotide sequence of a C. elegans GPCR of Srh-296;

[0581] SEQ ID NO: 510 is a nucleotide sequence of a C. elegans GPCR of Srh-30;

[0582] SEQ ID NO: 511 is a nucleotide sequence of a C. elegans GPCR of Srh-31;

[0583] SEQ ID NO: 512 is a nucleotide sequence of a C. elegans GPCR of Srh-33;

[0584] SEQ ID NO: 513 is a nucleotide sequence of a C. elegans GPCR of Srh-37;

[0585] SEQ ID NO: 514 is a nucleotide sequence of a C. elegans GPCR of Srh-46;

[0586] SEQ ID NO: 515 is a nucleotide sequence of a C. elegans GPCR of Srh-48;

[0587] SEQ ID NO: 516 is a nucleotide sequence of a C. elegans GPCR of Srh-50;

[0588] SEQ ID NO: 517 is a nucleotide sequence of a C. elegans GPCR of Sri-1;

[0589] SEQ ID NO: 518 is a nucleotide sequence of a C. elegans GPCR of Sri-2;

[0590] SEQ ID NO: 519 is a nucleotide sequence of a C. elegans GPCR of Sri-7;

[0591] SEQ ID NO: 520 is a nucleotide sequence of a C. elegans GPCR of Sri-10;

[0592] SEQ ID NO: 521 is a nucleotide sequence of a C. elegans GPCR of Sri-20;

[0593] SEQ ID NO: 522 is a nucleotide sequence of a C. elegans GPCR of Sri-21;

[0594] SEQ ID NO: 523 is a nucleotide sequence of a C. elegans GPCR of Sri-25;

[0595] SEQ ID NO: 524 is a nucleotide sequence of a C. elegans GPCR of Sri-28;

[0596] SEQ ID NO: 525 is a nucleotide sequence of a C. elegans GPCR of Sri-29;

[0597] SEQ ID NO: 526 is a nucleotide sequence of a C. elegans GPCR of Sri-30;

[0598] SEQ ID NO: 527 is a nucleotide sequence of a C. elegans GPCR of Sri-31;

[0599] SEQ ID NO: 528 is a nucleotide sequence of a C. elegans GPCR of Sri-38;

[0600] SEQ ID NO: 529 is a nucleotide sequence of a C. elegans GPCR of Sri-42;

[0601] SEQ ID NO: 530 is a nucleotide sequence of a C. elegans GPCR of Sri-43;

[0602] SEQ ID NO: 531 is a nucleotide sequence of a C. elegans GPCR of Sri-46;

[0603] SEQ ID NO: 532 is a nucleotide sequence of a C. elegans GPCR of Sri-48;

[0604] SEQ ID NO: 533 is a nucleotide sequence of a C. elegans GPCR of Sri-51;

[0605] SEQ ID NO: 534 is a nucleotide sequence of a C. elegans GPCR of Sri-54;

[0606] SEQ ID NO: 535 is a nucleotide sequence of a C. elegans GPCR of Sri-57;

[0607] SEQ ID NO: 536 is a nucleotide sequence of a C. elegans GPCR of Sri-60;

[0608] SEQ ID NO: 537 is a nucleotide sequence of a C. elegans GPCR of Sri-63;

[0609] SEQ ID NO: 538 is a nucleotide sequence of a C. elegans GPCR of Sri-66;

[0610] SEQ ID NO: 539 is a nucleotide sequence of a C. elegans GPCR of Sri-70;

[0611] SEQ ID NO: 540 is a nucleotide sequence of a C. elegans GPCR of Sri-73;

[0612] SEQ ID NO: 541 is a nucleotide sequence of a C. elegans GPCR of Sri-77;

[0613] SEQ ID NO: 542 is a nucleotide sequence of a C. elegans GPCR of Srd-1;

[0614] SEQ ID NO: 543 is a nucleotide sequence of a C. elegans GPCR of Srd-3;

[0615] SEQ ID NO: 544 is a nucleotide sequence of a C. elegans GPCR of Srd-5;

[0616] SEQ ID NO: 545 is a nucleotide sequence of a C. elegans GPCR of Srd-9;

[0617] SEQ ID NO: 546 is a nucleotide sequence of a C. elegans GPCR of Srd-10;

[0618] SEQ ID NO: 547 is a nucleotide sequence of a C. elegans GPCR of Srd-11;

[0619] SEQ ID NO: 548 is a nucleotide sequence of a C. elegans GPCR of Srd-12;

[0620] SEQ ID NO: 549 is a nucleotide sequence of a C. elegans GPCR of Srd-13;

[0621] SEQ ID NO: 550 is a nucleotide sequence of a C. elegans GPCR of Srd-15;

[0622] SEQ ID NO: 551 is a nucleotide sequence of a C. elegans GPCR of Srd-16;

[0623] SEQ ID NO: 552 is a nucleotide sequence of a C. elegans GPCR of Srd-17;

[0624] SEQ ID NO: 553 is a nucleotide sequence of a C. elegans GPCR of Srd-18;

[0625] SEQ ID NO: 554 is a nucleotide sequence of a C. elegans GPCR of Srd-19;

[0626] SEQ ID NO: 555 is a nucleotide sequence of a C. elegans GPCR of Srd-20;

[0627] SEQ ID NO: 556 is a nucleotide sequence of a C. elegans GPCR of Srd-23;

[0628] SEQ ID NO: 557 is a nucleotide sequence of a C. elegans GPCR of Srd-26;

[0629] SEQ ID NO: 558 is a nucleotide sequence of a C. elegans GPCR of Srd-27;

[0630] SEQ ID NO: 559 is a nucleotide sequence of a C. elegans GPCR of Srd-30;

[0631] SEQ ID NO: 560 is a nucleotide sequence of a C. elegans GPCR of Srd-32;

[0632] SEQ ID NO: 561 is a nucleotide sequence of a C. elegans GPCR of Srd-33;

[0633] SEQ ID NO: 562 is a nucleotide sequence of a C. elegans GPCR of Srd-38;

[0634] SEQ ID NO: 563 is a nucleotide sequence of a C. elegans GPCR of Srd-39 SV;

[0635] SEQ ID NO: 564 is a nucleotide sequence of a C. elegans GPCR of Srd-40 SV;

[0636] SEQ ID NO: 565 is a nucleotide sequence of a C. elegans GPCR of Srd-41;

[0637] SEQ ID NO: 566 is a nucleotide sequence of a C. elegans GPCR of Srd-42;

[0638] SEQ ID NO: 567 is a nucleotide sequence of a C. elegans GPCR of Srd-43 SV;

[0639] SEQ ID NO: 568 is a nucleotide sequence of a C. elegans GPCR of Srd-45;

[0640] SEQ ID NO: 569 is a nucleotide sequence of a C. elegans GPCR of Srd-49;

[0641] SEQ ID NO: 570 is a nucleotide sequence of a C. elegans GPCR of Srd-50 SV;

[0642] SEQ ID NO: 571 is a nucleotide sequence of a C. elegans GPCR of Srd-51;

[0643] SEQ ID NO: 572 is a nucleotide sequence of a C. elegans GPCR of Srd-53;

[0644] SEQ ID NO: 573 is a nucleotide sequence of a C. elegans GPCR of Srd-55;

[0645] SEQ ID NO: 574 is a nucleotide sequence of a C. elegans GPCR of Srd-59;

[0646] SEQ ID NO: 575 is a nucleotide sequence of a C. elegans GPCR of Srd-60;

[0647] SEQ ID NO: 576 is a nucleotide sequence of a C. elegans GPCR of Srd-61;

[0648] SEQ ID NO: 577 is a nucleotide sequence of a C. elegans GPCR of Srd-63;

[0649] SEQ ID NO: 578 is a nucleotide sequence of a C. elegans GPCR of Srd-64;

[0650] SEQ ID NO: 579 is a nucleotide sequence of a C. elegans GPCR of Srd-65;

[0651] SEQ ID NO: 580 is a nucleotide sequence of a C. elegans GPCR of Srd-66;

[0652] SEQ ID NO: 581 is a nucleotide sequence of a C. elegans GPCR of Srd-67;

[0653] SEQ ID NO: 582 is a nucleotide sequence of a C. elegans GPCR of Srd-71;

[0654] SEQ ID NO: 583 is a nucleotide sequence of a C. elegans GPCR of Srd-72;

[0655] SEQ ID NO: 584 is a nucleotide sequence of a C. elegans GPCR of Srd-74;

[0656] SEQ ID NO: 585 is a nucleotide sequence of a C. elegans GPCR of Srj-1;

[0657] SEQ ID NO: 586 is a nucleotide sequence of a C. elegans GPCR of Srj-4;

[0658] SEQ ID NO: 587 is a nucleotide sequence of a C. elegans GPCR of Srj-5;

[0659] SEQ ID NO: 588 is a nucleotide sequence of a C. elegans GPCR of Srj-6;

[0660] SEQ ID NO: 589 is a nucleotide sequence of a C. elegans GPCR of Srj-7;

[0661] SEQ ID NO: 590 is a nucleotide sequence of a C. elegans GPCR of Srj-8;

[0662] SEQ ID NO: 591 is a nucleotide sequence of a C. elegans GPCR of Srj-9;

[0663] SEQ ID NO: 592 is a nucleotide sequence of a C. elegans GPCR of Srj-11;

[0664] SEQ ID NO: 593 is a nucleotide sequence of a C. elegans GPCR of Srj-14;

[0665] SEQ ID NO: 594 is a nucleotide sequence of a C. elegans GPCR of Srj-15;

[0666] SEQ ID NO: 595 is a nucleotide sequence of a C. elegans GPCR of Srj-19;

[0667] SEQ ID NO: 596 is a nucleotide sequence of a C. elegans GPCR of Srj-22;

[0668] SEQ ID NO: 597 is a nucleotide sequence of a C. elegans GPCR of Srj-26;

[0669] SEQ ID NO: 598 is a nucleotide sequence of a C. elegans GPCR of Srj-27;

[0670] SEQ ID NO: 599 is a nucleotide sequence of a C. elegans GPCR of Srj-37;

[0671] SEQ ID NO: 600 is a nucleotide sequence of a C. elegans GPCR of Srj-39;

[0672] SEQ ID NO: 601 is a nucleotide sequence of a C. elegans GPCR of Srj-44;

[0673] SEQ ID NO: 602 is a nucleotide sequence of a C. elegans GPCR of Srm-1;

[0674] SEQ ID NO: 603 is a nucleotide sequence of a C. elegans GPCR of Srm-2;

[0675] SEQ ID NO: 604 is a nucleotide sequence of a C. elegans GPCR of Srm-3;

[0676] SEQ ID NO: 605 is a nucleotide sequence of a C. elegans GPCR of Srm-4;

[0677] SEQ ID NO: 606 is a nucleotide sequence of a C. elegans GPCR of Srm-5.

### DETAILED DESCRIPTION OF THE INVENTION

### General Techniques and Definitions

[0678] Unless specifically defined otherwise, all technical and scientific terms used herein shall be taken to have the same meaning as commonly understood by one of ordinary skill in the art (e.g., in cell culture, yeast genetics, molecular genetics, immunology, immunohistochemistry, protein chemistry, and biochemistry).

[0679] Unless otherwise indicated, the recombinant protein and yeast biology techniques utilized in the present invention are standard procedures, well known to those skilled in the art. Such techniques are described and explained throughout the literature in sources such as, J. Perbal, A Practical Guide to Molecular Cloning, John Wiley and Sons (1984), J. Sambrook et al., Molecular Cloning: A Laboratory Manual, Cold Spring Harbour Laboratory Press (1989), T. A. Brown (editor), Essential Molecular Biology: A Practical Approach, Volumes 1 and 2, IRL Press (1991), D. M. Glover and B. D. Hames (editors), DNA Cloning: A Practical Approach, Volumes 1-4, IRL Press (1995 and 1996), and F. M. Ausubel et al. (editors), Current Protocols in Molecular Biology, Greene Pub. Associates and Wiley-Interscience (1988, including all updates until present).

[0680] The term “and/or”, e.g., “X and/or Y” shall be understood to mean either “X and Y” or “X or Y” and shall be taken to provide explicit support for both meanings or for either meaning.

[0681] As used herein, the term about, unless stated to the contrary, refers to +/−10%, more preferably +/−5%, more preferably +/−1%, of the designated value.

[0682] Throughout this specification the word “comprise”, or variations such as “comprises” or “comprising”, will be understood to imply the inclusion of a stated element, integer or step, or group of elements, integers or steps, but not the exclusion of any other element, integer or step, or group of elements, integers or steps.

[0683] As used herein, the term “z factor” refers to a measure of the response (sensitivity) of the yeast of the invention to a ligand for a given nematode GPCR (Zhang et al., 1999). Z-factor is defined in terms of four parameters: the means and standard deviations of both the positive (p) and negative (n) controls (μ_{P}, σ_{P}, and μₙ, σₙ). Given these values, the Z-factor is defined as:

$$Z \text{-} factor = 1 - \frac{3 ( {σ}_{p} + {σ}_{n} )}{\vert {μ}_{p} - {μ}_{n} \vert} .$$

Generally, Z-factor is estimated from the sample means and sample standard deviations

$$Estimated Z \text{-} factor = 1 - \frac{3 ( {\hat{σ}}_{p} + {\hat{σ}}_{n} )}{\vert {\hat{μ}}_{p} - {\hat{μ}}_{n} \vert} .$$

[0684] The “sample” can be any substance or composition suspected of comprising a ligand to be detected. Examples of samples include air, gas, liquid, biological material and soil. The sample may be obtained directly from the environment or source, or may be at least partially purified by a suitable procedure before a method of the invention is performed. For example, the methods of the invention can be used to identify and isolate receptors that respond to chemicals that are relevant in an agricultural production setting, particularly those present at nanomolar or parts per billion ((v/v; w/v; or by molar ratio) levels or lower. Such chemicals include volatile or non-volatile indicators of pathogen presence absence, pest or parasite presence or absence, crop or animal vigour, ripeness or other agronomically useful attribures. In the human health field, the methods of the invention can be used to identify and isolate receptors that selectively respond to volatile or non-volatile markers of infections (e.g. malaria, tuberculosis, influenza, leishmaniasis, bacteraemia, soft tissue infections, urinary tract infections, lungh infections etc.) or non-infectious diseases (e.g. lung cancers, pancreatic cancers, ovarian and other cancers and non-infectious conditions and also genetic deficiency conditions, degenerative diseases and metabolic conditions such as Type I or Type II diabetes, metabolic syndrome etc. or the quality of treatment or control of any infectious or non-infectious health condition). In a food safety and quality context the methods of the invention can be used to identify and isolate receptors that respond to volatile or non-volatile chemicals indicative of the presence of microbial contamination, mycotoxin or other toxin contamination, or the presence of inadvertent contaminants, or deliberate adulterants in food. The methods of the invention can be used to identify and isolate receptors for compounds that indicate particular desirable or undesirable organoleptic attributes, such as ripeness or maturity of fruits, cheeses and other products or contaminants and taints such as cork taint in wine, boar taint in pork, “Bret” taint in wines and other alcoholic beverages or sulphuraceous or other taints in milk and dairy products. The methods of the invention can be used for similar purposes relevant to a wide range of other economic or social activities, including security screening, process control, environmental monitoring, indoor climate control, consumer product development and manufacturing etc. In addition, the identified and isolated receptors can be used in other methods of the invention to detect a compound (ligand) mentioned above.

[0685] The “ligand” can be any compound which binds and activates a particular G protein coupled receptor, such as, but not limited to, a peptide, a protein, a hormone, a lipid, a small carbon based molecule, a carbohydrate, an oil, an odorant, a polymer etc.

[0686] As used herein, resonance energy transfer (RET) is a proximity assay based on the non-radioactive transfer of energy between a donor molecule and an acceptor molecule.

[0687] As used herein, the term “acceptor molecule” refers to any compound which can accept energy emitted as a result of the activity of a donor, and re-emit it as light energy.

[0688] As used herein, the term “spatial location” refers to the three dimensional positioning of the donor molecule relative to the acceptor molecule which changes as a result of a compound binding a polypeptide defined herein.

[0689] As used herein, the term “dipole orientation” refers to the direction in three-dimensional space of the dipole moment associated either with the donor molecule and/or the acceptor molecule relative their orientation in three-dimensional space. The dipole moment is a consequence of a variation in electrical charge over a molecule.

[0690] As used herein, the term “bioluminescent protein” refers to any protein capable of acting on a suitable substrate to generate luminescence.

[0691] As used herein, the term “substrate” refers to any molecule that can be used in conjunction with a bioluminescent protein to generate or absorb luminescence.

### Nematode G Protein Coupled Receptors

[0692] As used herein, unless specified otherwise, the term “G protein coupled receptor” refers to a seven transmembrane receptor which signals through G proteins. The receptor may be a single subunit, or two or more receptor subunits. When two or more receptor subunits are present they may be the same, different, or a combination thereof (for example, two of one subunit and a single of another subunit). In one embodiment, the yeast cells of the invention comprise a homodimer of the same GPCR subunit. In another embodiment, the yeast cells of the invention comprise a heterodimer of different GPCR subunits. When expressed in a yeast cell, the GPCRs are located in the yeast cell membrane. In addition, when expressed in a yeast cell the GPCR is functionally coupled with an intracellular signalling pathway such as the pheromone response pathway. Furthermore, unless specified or implied otherwise the terms “G protein coupled receptor” and “subunit of a G protein coupled receptor”, or variations thereof, are used interchangeably.

[0693] Nematode receptors comprise a unique GPCR clade (Fredriksson and Schioth, 2005) (FIG. 10). The GPCRs useful for the invention may be obtained from a variety of nematodes including, but not limited to, those of the Genera: Caenorhabditis such as C. elegans, Ancylostoma such as Ancylostoma caninum, Anguina, Ditylenchus, Tylenchorhynchus, Pratylenchus, Radopholus, Hirschmanniella, Nacobbus, Hoplolaimus, Scutellonema, Rotylenchus, Helicotylenchus, Rotylenchulus, Belonolaimus, Heterodera such as Heterodera glycines, Meloidogyne such as Meloidogyne javanica, Meloidogyne incognita, and Meloidogyne arenaria, Criconemoides, Hemicycliophora, Paratylenchus, Tylenchulus, Aphelenchoides, Bursaphelenchus, Rhadinaphelenchus, Longidorus, Xiphinema, Trichodorus, Paratrichodorus, Dirofiliaria such as Dirofilaria immitis, Dirofilaria tenuis, Dirofilaria repens, and Dirofilari ursi, Onchocerca, Brugia, Acanthocheilonema, Aelurostrongylus, Ancylostoma, Angiostrongylus, Ascaris, Bunostomum, Capillaria, Chabertia, Cooperia, Crenosoma, Dictyocaulus, Dioctophyme, Dipetalonema, Dracunculus, Enterobius, Filaroides, Haemonchus such as Haemonchus contortus, Lagochilascaris, Loa, Manseonella, Muellerius, Necator, Nematodirus, Oesophagostomum, Ostertagia, Parafilaria, Parascaris, Physaloptera, Protostrongylus, Setaria, Spirocerca, Stephanogilaria, Strongyloides, Strongylus, Thelazia, Toxascaris, Toxocara such as Toxocara canis and Toxocara cati, Trichinella such as Trichinella spiralis and Trichurs muris, Trichostrongylus, Trichuris, Uncinaria, and Wuchereria.

[0694] In an embodiment, the GPCR is a chemoreceptor (or putative chemoreceptors), odorant receptor (or putative odorant receptors) or taste receptor (or putative taste receptor) as identified by Robertson et al. (1998 and 2001).

[0695] The GPCR may have an amino acid sequence which is naturally occurring or which is a mutant/variant thereof, a biologically active fragment thereof, or a fusion thereof. Amino acid sequence mutants/variants of naturally occurring G protein coupled receptors can be prepared by introducing appropriate nucleotide changes into the encoding polynucleotide, or by in vitro synthesis of the desired polypeptide. Such mutants include, for example, deletions, insertions or substitutions of residues within the amino acid sequence. A combination of deletion, insertion and substitution can be made to arrive at the final construct, provided that the final polypeptide product possesses the desired characteristics.

[0696] Mutant (variant) polypeptides can be prepared using any technique known in the art. For example, a polynucleotide described herein can be subjected to in vitro mutagenesis. Such in vitro mutagenesis techniques may include sub-cloning the polynucleotide into a suitable vector, transforming the vector into a “mutator” strain such as the E. coli XL-1 red (Stratagene) and propagating the transformed bacteria for a suitable number of generations. In another example, the polynucleotides encoding G protein coupled receptors are subjected to DNA shuffling techniques as broadly described by Harayama (1998). Products derived from mutated/variant DNA can readily be screened using techniques described herein to determine if they are useful for the methods of the invention.

[0697] In designing amino acid sequence mutants, the location of the mutation site and the nature of the mutation will depend on characteristic(s) to be modified. The sites for mutation can be modified individually or in series, e.g., by (1) substituting first with conservative amino acid choices and then with more radical selections depending upon the results achieved, (2) deleting the target residue, or (3) inserting other residues adjacent to the located site.

[0698] Amino acid sequence deletions generally range from about 1 to 15 residues, more preferably about 1 to 10 residues and typically about 1 to 5 contiguous residues.

[0699] Substitution mutants have at least one amino acid residue in the G protein coupled receptor removed and a different residue inserted in its place. The sites of greatest interest for substitutional mutagenesis include sites identified as important for function. Other sites of interest are those in which particular residues obtained from various strains or species are identical. These positions may be important for biological activity. These sites, especially those falling within a sequence of at least three other identically conserved sites, are preferably substituted in a relatively conservative manner. Such conservative substitutions are shown in Table 1.

TABLE 1
Exemplary substitutions.

| Original | Exemplary |
|---|---|
| Residue | Substitutions |
| Ala (A) | val; leu; ile; gly |
| Arg (R) | lys |
| Asn (N) | gln; his |
| Asp (D) | glu |
| Cys (C) | ser |
| Gln (Q) | asn; his |
| Glu (E) | asp |
| Gly (G) | pro, ala |
| His (H) | asn; gln |
| Ile (I) | leu; val; ala |
| Leu (L) | ile; val; met; ala; phe |
| Lys (K) | arg |
| Met (M) | leu; phe |
| Phe (F) | leu; val; ala |
| Pro (P) | gly |
| Ser (S) | thr |
| Thr (T) | ser |
| Trp (W) | tyr |
| Tyr (Y) | trp; phe |
| Val (V) | ile; leu; met; phe; ala |

[0700] Also included within the scope of the invention are polypeptides which are differentially modified during or after synthesis, e.g., by biotinylation, benzylation, glycosylation, acetylation, phosphorylation, amidation, derivatization by known protecting/blocking groups, proteolytic cleavage, linkage to an antibody molecule or other cellular ligand, etc. These modifications may serve to increase the stability and/or bioactivity of the polypeptide.

[0701] Furthermore, the GPCR may be a non-naturally occurring chimera of two or more different GPCRs. In particular, this enables a transduction cassette to be produced where portions of one receptor are always present in the chimera into which other portions of a wide variety of GPCRs are inserted depending on the compound to be detected.

[0702] In one embodiment, the subunit comprises the N-terminus and at least a majority of the first transmembrane domain of a first G protein coupled receptor subunit, at least a majority of the first non-transmembrane loop through to at least a majority of the fifth transmembrane domain of a second G protein coupled receptor subunit, and at least a majority of the fifth non-transmembrane loop through to the C-terminal end of the first G protein coupled receptor subunit.

[0703] In another embodiment, the subunit comprises the N-terminus through to at least a majority of the fifth transmembrane domain of a first G protein coupled receptor subunit, and at least a majority of the fifth non-transmembrane loop through to the C-terminal end of a second G protein coupled receptor subunit.

[0704] The skilled person can readily determine the N-terminal end, transmembrane domains, non-transmembrane loops (domains) and C-terminus of a G protein coupled receptor. For example, a variety of bioinformatics approaches may be used to determine the location and topology of transmembrane domains in a protein, based on its amino acid sequence and similarity with known transmembrane domain of G protein coupled receptors. Alignments and amino acid sequence comparisons are routinely performed in the art, for example, by using the BLAST program or the CLUSTAL W program. Based on alignments with known transmembrane domain-containing proteins, it is possible for one skilled in the art to predict the location of transmembrane domains. Furthermore, the 3 dimensional structures of some membrane-spanning proteins are known, for example, the seven transmembrane G-protein coupled rhodopsin photoreceptor structure has been solved by x-ray crystallography. Based on analyses and comparisons with such 3D structures, it may be possible to predict the location and topology of transmembrane domains in other membrane proteins. There are also many programs available for predicting the location and topology of transmembrane domains in proteins. For example, one may use one or a combination of the TMpred (Hofmann and Stoffel, 1993), which predicts membrane spanning proteins segments; TopPred (von Heijne et al., 1992) which predicts the topology of membrane proteins; PREDATOR (Frishman and Argos, 1997), which predicts secondary structure from single and multiple sequences; TMAP (Persson and Argos, 1994), which predicts transmembrane regions of proteins from multiply aligned sequences; and ALOM2 (Klein et al., 1984), which predicts transmembrane regions from single sequences.

[0705] In an embodiment, the nematode GPCR comprises a sequence which is at least 40% identical to one or more of SEQ ID NO's 1 to 297.

[0706] With regard to a defined polypeptide, it will be appreciated that % identity figures higher than those provided above will encompass preferred embodiments. Thus, where applicable, in light of the minimum % identity figures, it is preferred that the polypeptide comprises an amino acid sequence which is at least 50%, more preferably at least 60%, more preferably at least 70%, more preferably at least 80%, more preferably at least 85%, more preferably at least 90%, more preferably at least 91%, more preferably at least 92%, more preferably at least 93%, more preferably at least 94%, more preferably at least 95%, more preferably at least 96%, more preferably at least 97%, more preferably at least 98%, more preferably at least 99%, more preferably at least 99.1%, more preferably at least 99.2%, more preferably at least 99.3%, more preferably at least 99.4%, more preferably at least 99.5%, more preferably at least 99.6%, more preferably at least 99.7%, more preferably at least 99.8%, and even more preferably at least 99.9% identical to the relevant nominated SEQ ID NO.

[0707] The % identity of a polypeptide is determined by GAP (Needleman and Wunsch, 1970) analysis (GCG program) with a gap creation penalty=5, and a gap extension penalty=0.3. The query sequence is at least 25 amino acids in length, and the GAP analysis aligns the two sequences over a region of at least 25 amino acids. More preferably, the query sequence is at least 50 amino acids in length, and the GAP analysis aligns the two sequences over a region of at least 50 amino acids. More preferably, the query sequence is at least 100 amino acids in length and the GAP analysis aligns the two sequences over a region of at least 100 amino acids. Even more preferably, the query sequence is at least 250 amino acids in length and the GAP analysis aligns the two sequences over a region of at least 250 amino acids. Even more preferably, the GAP analysis aligns the two sequences over their entire length. If the GPCR is a chimera of two or more different nematode GPCRs, it is preferred that the alignments are performed independently for each different section of the GPCR from a different molecule.

[0708] As used herein, a “biologically active fragment” is a portion of a polypeptide as described herein which maintains a defined activity of the full-length polypeptide. For example, a biologically active fragment of a G protein coupled receptor must be capable of binding the target ligand resulting in activation of a signalling pathway in the yeast cell linked to the reporter gene. Biologically active fragments can be any size as long as they maintain the defined activity. Preferably, biologically active fragments are at least 150, more preferably at least 250 amino acids in length.

[0709] As used herein, a “biologically active variant” is a molecule which differs from a naturally occurring and/or defined molecule by one or more amino acids but maintains a defined activity, such as defined above for biologically active fragments. Biologically active variants are typically at least 50%, more preferably at least 80%, more preferably at least 90%, more preferably at least 95%, more preferably at least 97%, and even more preferably at least 99% identical to the naturally occurring and/or defined molecule.

[0710] Nematode G protein coupled receptor used in the invention require a suitable signal sequence, such as a hydrophobic N-terminal signal sequence, to direct the receptor after translation to the cell membrane. Such signal sequences are well known in the art. In an embodiment, the native signal sequence of the nematode G protein coupled receptor is used. In an alternate embodiment, the nematode G protein coupled receptor comprises a yeast N-terminal signal sequence which may be cleaved during transport of the receptor to the cell membrane. Examples of such yeast signal sequences include, but are not limited to, the yeast a-mating factor signal sequence or the yeast invertase signal sequence.

### G Proteins

[0711] G-proteins are a family of proteins involved in second messenger cascades for intracellular signaling. G proteins function as “molecular switches,” alternating between an inactive guanosine diphosphate (GDP) bound state and an active guanosine triphosphate (GTP) bound state. Ultimately, G proteins regulate downstream cell processes by initiating cascades of signal transduction networks (Hofmann et al., 2009; Oldham and Hamm, 2008).

[0712] There are two distinct families of G proteins: Heterotrimeric G proteins, sometimes referred to as the “large” G proteins, that are activated by G protein coupled receptors and made up of alpha (α), beta (β), and gamma (γ) subunits; and “small” G proteins (20-25 kDa) that belong to the Ras superfamily of small GTPases. These proteins are homologous to the alpha (α) subunit found in heterotrimeric G proteins, and also bind GTP and GDP and are involved in signal transduction. In order to associate with the plasma membrane, many G proteins are covalently modified with lipids, for example heterotrimeric G protein subunits may be myristolated, palmitoylated, or prenylated, while small G proteins may be prenylated.

[0713] As the skilled addressee will be aware, there are many known nematode G-proteins, as well as routine methods for identifying yet unknown nematode G-proteins. For example, C. elegans has 21 Gα, 2 Gβ and 2 Gγ genes (Jansen et al., 1999; Cuppen et al., 2003). C. elegans expresses one ortholog of each of the mammalian families: GSA-1 (Gs), GOA-1 (Gi/o), EGL-30 (Gq) and GPA-12 (G12). The remaining C. elegans α subunits (GPA-1-11, GPA-13-17 and ODR-3) do not share sufficient homology to allow classification. The conserved Gα subunits, with the exception of GPA-12, are expressed broadly while 14 of the new Gα genes are expressed in subsets of chemosensory neurons.

[0714] The Gβ subunit, GPB-1, as well as the Gγ subunit, GPC-2, appear to function along with the α subunits in the classic G protein heterotrimer. The remaining Gβ subunit, GPB-2, is thought to regulate the function of certain RGS proteins, while the remaining Gγ subunit, GPC-1, has a restricted role in chemosensation. The functional difference for most G protein pathways in C. elegans, therefore, resides in the α subunit.

[0715] The G protein may have an amino acid sequence which is naturally occurring or which is a mutant/variant thereof, or a biologically active fragment thereof, a fusion thereof. These concepts are well known in the art and described above in relation to the GPCRs. In a preferred embodiment, as part of the signalling cascade the Ga protein dissociates from yeast Gβγ protein, which leads to activation of the MAP kinase signalling pathway and results in reporter gene expression.

[0716] The invention, in part, relies on the expression in yeast of a chimeric G protein comprising the N-terminus of a yeast gpa-1 and at least four C-terminal amino acids of a nematode G protein. The production of such chimeric proteins and their use detecting signalling through heterologously expressed GPCRs has been previously described by, for example, Brown et al. (2000), WO 99/14344 and WO 99/18211. In an embodiment, the chimeric G protein comprises about 5 of the C-terminal amino acids of the nematode G protein at the C-terminus of the chimera. In another embodiment, the chimeric G protein comprises about 5 to about 11 of the C-terminal amino acids of the nematode G protein at the C-terminus of the chimera.

[0717] In an embodiment, the nematode G protein is gpa-1, gpa-2, gpa-3, gpa-6, gpa-13 or gpa-15.

### Recombinant Yeast

[0718] The present invention relates to recombinant yeast cells, and the use thereof to identify ligand binding to a heterologously expressed GPCR.

[0719] As used herein, “activates” or variations thereof in relation to the ligand binding a GPCR means that upon binding of the ligand to the receptor an intracellular signaling cascade involving G proteins and the MAP kinase pathway in the yeast is turned on ultimately resulting in expression of the reporter gene.

[0720] The yeast cell can be any cell suitable for the invention. In a particularly 10 preferred embodiment, the yeast cell, in a native unmodified state, has a functional G protein coupled receptor signalling pathway such as the pheromone responsive pathway. The yeast cell may be a member of the Saccharomyces genus such as Saccharomyces cerevisiae, Saccharomyces uvae or Saccharomyces kluyveri, Ustilaqo genus such Ustilaqo maydis, Kluyveromyces genus such as Kluyveromyces lactis or Kluyveromyces drosophilarum, Pichia genus such as Pichia pastoris and Pichia membranaefaciens, Schizosaccharomyces genus such as Schizosaccharomyces pombe, Yarrowia genus such as Yarrowia lipolytica, Candida genus such as Candida utilis or Candida cacaoi or Zygosaccharomyces genus such as Zygosaccharomyces rouxii, Zygosaccharomyces bailii and Zygosaccharomyces fermentati.

[0721] In a preferred embodiment, the yeast cell is Saccharomyces sp., more preferably Saccharomyces cerevisiae.

[0722] In a preferred embodiment, the yeast cell is haploid. In a further preferred embodiment, the yeast cell is mating type a or α.

[0723] Yeast cells of the invention have a mutated gpa-1 gene. The term “mutated” when referring to an endogenous yeast gene, such as gpa-1, far-1, sst-1 and ste-2 gene means that expression has been reduced, and/or the function of the encoded normal (wild-type) protein has been diminished (preferably abolished), when compared to a yeast cell with a corresponding normal (wild type) gene. Preferably, no functional protein normally encoded by the gene can be found in the yeast cell. Such mutated genes can be produced by a wide variety of routine procedures such as mutagenesis or gene knockouts. In an embodiment, one, more or all of the far-1, sst-1 and ste-2 genes have been deleted.

[0724] Examples of mutated yeast gpa-1 genes are described in Iguchi et al. (2010), Dowell and Brown (2009), Brown et al. (2000), Fukutani et al. (2012), WO 99/14344 and WO 99/18211. Examples of far-1, sst-2 and ste-2 mutated genes are described in Fukutani et al. (2012).

[0725] As used herein, “operably linked” refers to a functional relationship between two or more nucleic acid (e.g., DNA) segments. Typically, it refers to the functional relationship of transcriptional regulatory element to a transcribed sequence. For example, a promoter is operably linked to a coding sequence, such as a polynucleotide defined herein, if it stimulates or modulates the transcription of the coding sequence in an appropriate host cell expression system. Generally, promoter transcriptional regulatory elements that are operably linked to a transcribed sequence are physically contiguous to the transcribed sequence, i.e., they are cis-acting. However, some transcriptional regulatory elements, such as enhancers, need not be physically contiguous or located in close proximity to the coding sequences whose transcription they enhance.

[0726] “Constitutive promoter” refers to a promoter that directs expression of an operably linked transcribed sequence in the yeast without the need to be induced by specific growth conditions. Examples of constitutive promoters useful for the invention, for instance operably linked to the first polynucleotide, include, but are not limited to, a yeast PGK (phosphoglycerate kinase) promoter, a yeast ADH-1 (alcohol dehydrogenase) promoter, a yeast ENO (enolase) promoter, a yeast glyceraldehyde 3-phosphate dehydrogenase promoter (GPD) promoter, a yeast PYK-1 (pyruvate kinase) promoter, a yeast translation-elongation factor-1-alpha promoter (TEF) promoter and a yeast CYC-1 (cytochrome c-oxidase promoter) promoter. In a preferred embodiment, a yeast promoter is a S. cerevisiae promoter. In another embodiment, the constitutive promoter may not have been derived from yeast. Examples of such promoters useful for the invention include, but are not limited to, the cauliflower mosaic virus 35S promoter, the glucocorticoid response element, and the androgen response element. The constitutive promoter may be the naturally occurring molecule or a variant thereof comprising, for example, one, two or three nucleotide substitutions which do not abolish (and preferably enhance) promoter function.

[0727] As used herein, the term “promoter activated by the yeast MAP kinase pathway” refers to a promoter which drives gene transcription of an operably linked polynucleotide (nucleic acid) in response to the yeast MAP kinase pathway being activated through binding of a ligand to the GPCR (see FIGS. 1 and 2). Examples of promoter activated by the yeast MAP kinase pathway used in the invention include, but are not limited to, FIG2 (yeast protein involved in mating induction), FIG1 (yeast protein required for efficient mating), FIG4 (yeast Dac1p homolog), PRM1 (yeast pheromone-regulated membrane protein), ERG24, (yeast C-14 sterol reductase), FUS3, (yeast MAPK mediating mating pheromone signalling), PEP1 (yeast receptor for vacuole sorting), YOR129C, HYM1, FAR1 (yeast protein involved in cell cycle arrest) and PCL2 (yeast cyclin protein). In an embodiment, the promoter is bound, and transcription is activated by the yeast Ste12 transcription factor. As mentioned above, the promoter activated by the yeast MAP kinase pathway is not the FUS-1 promoter. The promoter activated by the yeast MAP kinase pathway may be the naturally occurring molecule or a variant thereof comprising, for example, one, two or three nucleotide substitutions which do not abolish (and preferably enhance) promoter function.

[0728] The promoter operably linked to the third polynucleotide encoding the chimeric G protein can be any suitable promoter such as a constitutive promoter as described above. Conveniently, in an embodiment, the promoter is the endogenous gpa-1 promoter. In this regard, the gene encoding the chimeric protein is the endogenous gene which has been mutated to express the C-terminal amino acids of a nematode G protein.

[0729] As used herein, the term “high copy number” means that the yeast cell comprises at least about 75, or at least about 100, or at least about 150, or between about 75 and about 500, or between about 100 and about 400, or between about 100 and about 250, copies of the extrachromosomal polynucleotide. In an embodiment, the extrachromosomal polynucleotide is a plasmid, cosmid or virus, preferably a plasmid. Alternatively, when referring to a population (and/or library) of yeast cells of the invention, the term “high copy number” means that on average each yeast cell comprises at least about 75, or at least about 100, or at least about 150, or between about 75 and about 500, or between about 100 and about 400, or between 100 and 250, copies of the extrachromosomal polynucleotide. In an embodiment, a high copy number plasmid useful for the invention has a 2micron origin of replication (known in the art as YEp plasmids). Examples of yeast high copy number plasmid include, but are not limited to, Gateway^{TM} pENTR (Invitrogen) and pRS420 (Christianson et al., 1992).

[0730] The yeast extrachromosomal polynucleotides, for example plasmids, described herein typically contain a yeast origin of replication, an antibiotic resistance gene, a bacterial origin of replication (for propagation in bacterial cells), multiple cloning sites, and a yeast nutritional gene for maintenance in yeast cells. The nutritional gene (or “auxotrophic marker”) is most often one of the following: 1) TRP1 (Phosphoribosylanthranilate isomerase); 2) URA3 (Orotidine-5′-phosphate decarboxylase); 3) LEU2 (3-Isopropylmalate dehydrogenase); 4) HISS (Imidazoleglycerolphosphate dehydratase or IGP dehydratase); or 5) LYS2 (α-aminoadipate-semialdehyde dehydrogenase). However, there are many known nutritional markers including those mentioned herein. Furthermore, the nutritional gene marker for a plasmid will be different to that for the reporter gene operably linked to the promoter activated by the yeast MAP kinase pathway.

[0731] Recombinant yeast of the invention comprises a reporter gene which either encodes a galactosidase or a selectable growth marker.

[0732] The “galactosidase” may be any enzyme which cleaves a terminal galactose residue(s) from a variety of substrates, and which is able to also cleave a substrate to produce a detectable signal. In an embodiment, the galactosidase is a β-galactosidase such as bacterial (for instance from E. coli) LacZ. In an alternate embodiment, the galactosidase is an α-galactosidase such as yeast (for instance S. cerevisiae) Mel-1 (Melcher et al., 2000; Aho et al., 1997). β-galactosidase activity may be detected using substrates for the enzyme such as X-gal (5-bromo-4-chloro-indolyl-β-D-galactopyranoside) which forms an intense blue product after cleavage, ONPG (o-nitrophenyl galactoside) which forms a water soluble yellow dye with an absorbance maximum at about 420 nm after cleavage, and CPRG (chlorophenol red-β-D-galactopyranoside) which yields a water-soluble red product measurable by spectrophotometry after cleavage. α-galactosidase activity may be detected using substrates for the enzyme such as o-nitrophenyl α-D-galactopyranoside which forms an indigo dye after cleavage, and chlorophenol red-α-D-galactopyranoside which yields a water-soluble red product measurable by spectrophotometry after cleavage. Kits for detecting galactosidase expression in yeast are commercially available, for instance the β-galactosidase (LacZ) expression kit from Thermo Scientific.

[0733] Preferably, the selectable growth marker is a nutritional marker or antibiotic resistance marker.

[0734] Typical yeast selectable nutritional markers include, but are not limited to, LEU2, TRP1, HIS3, HIS4, URA3, URA5, SFA1, ADE2, MET15, LYS5, LYS2, ILV2, FBA1, PSE1, PDI1 and PGK1. Those skilled in the art will appreciate that any gene whose chromosomal deletion or inactivation results in an unviable host, so called essential genes, can be used as a selective marker if a functional gene is provided on the, for example, plasmid, as demonstrated for PGK1 in a pgk1 yeast strain (Piper and Curran, 1990). Suitable essential genes can be found within the Stanford Genome Database (SGD) (http:://db.yeastgenome.org). Any essential gene product (e.g. PDI1, PSE1, PGK1 or FBA1) which, when deleted or inactivated, does not result in an auxotrophic (biosynthetic) requirement, can be used as a selectable marker on a, for example, plasmid in a yeast host cell that, in the absence of the plasmid, is unable to produce that gene product, to achieve increased plasmid stability without the disadvantage of requiring the cell to be cultured under specific selective conditions. By “auxotrophic (biosynthetic) requirement” we include a deficiency which can be complemented by additions or modifications to the growth medium.

[0735] Examples of antibiotic resistance genes (markers) include, but are not limited to, a chloramphenicol resistance gene, an ampicillin resistance gene, a tetracycline resistance gene, a Zeocin resistance gene, a spectinomycin resistance gene and a kanamycin resistance gene.

[0736] Yeast cells are typically transformed by chemical methods (e.g., as described by Rose et al., 1990, Methods in Yeast Genetics, Cold Spring Harbor Laboratory Press, Cold Spring Harbor, N.Y., and in Kawai et al., 2010). The cells are typically treated with lithium acetate to achieve transformation efficiencies of approximately 10⁴ colony-forming units (transformed cells)/μg of DNA. Other standard procedures for transforming yeast include i) the spheroplast method which, as the name suggests, relies on the production of yeast spheroplasts, ii) the biolistic method where DNA coated metal microprojectiles are shot into the cells, and iii) the glass bead methods which relies on the agitation of the yeast cells with glass beads and the DNA to be delivered to the cell. Of course, any suitable means of introducing nucleic acids into yeast cells can be used.

[0737] It is well known that transformation of organisms, such as yeast, with exogenous plasmids can lead to clonal differences in the penetrance of the transformed gene, due to differences in copy number or other factors. It is therefore advisable to screen two or more independent clonal isolates for each transformed receptor in order to maximise the likelihood of identifying suitable receptor=ligand pairs during screening. Different clonal isolates may be screened independently or may be combined into a single well for screening. The latter option may be particularly convenient where a nutritional reporter is used rather than a colorimetric reporter.

### Library Screening

[0738] The yeast of the invention can be used to test a small number of candidate compounds (ligands) for binding and activating a GPCR, or may be used to screen a library of compounds. The invention may use a “library” of test compounds, a library of different GPCRs, or a combination thereof.

[0739] As used herein, a “library” or “population” refers to a collection of many different compounds or yeast cells, for example, at least 10, at least 25, at least 50, at least 100, at least 500, at least 1,000, or at least 10,000, different compounds or yeast cells. Generally, a population may comprise each of the different yeast cells in a single container (for example culture), whereas a library generally has separate containers (for example wells on a microtitre plate) for each different yeast expressing a different GPCR. The compounds in the library may be related in structure, be completely different, or a mixture thereof. Examples of related compounds include a library of polypeptides which are at least 75%, or at least 90%, or at least 95%, identical to each other. As the skilled person would appreciate, some of the compounds in a library may be the same. In an embodiment, the library is a population of different yeast of the invention. In another embodiment, a library of potential ligands is used to screen against a yeast expressing a particular nematode GPCR. In a further embodiment, two or more potential ligands are screened against two or more different nematode GPCRs.

[0740] Screening may be performed by using one of the methods well known to the practitioner in the art, such as in microwells, by labelled cell sorting, or by growth on (or in) media (such as agar plates) where the reporter is a nutritional marker.

[0741] In a preferred embodiment, when measuring galactosidase activity the yeast are cultured in a microwell plate(s) comprising, for example, 48, 96, 384 or more wells.

[0742] In an alternate embodiment, when measuring expression of a selectable growth marker the yeast can be cultured on agar plates comprising (for example, an antibiotic) or lacking (for example, a nutrient to be compensated by expression of the reporter) the suitable reagent necessary to detect expression of the reporter. As the skilled person would appreciate, such selection could also be performed in liquid cultures and, for example, O.D. of the cells measured.

[0743] The assay conditions may be varied to take into account optimal binding conditions for different binding ligands of interest or other biological activities. Thus, the pH, temperature, salt concentration, volume and duration of binding, etc. may all be varied to achieve binding of ligand to the GPCR under conditions which resemble those of the environment of interest.

[0744] In one embodiment, the test compounds are small, organic non-peptidic compounds. In another embodiment, the test compound is a peptide or peptidomimetic. Exemplary methods for the synthesis of molecular libraries can be found in the art, for example in: Erb et al. (1994) and Gallop et al. (1994).

[0745] In an embodiment, the test compound is volatile. For the screening of a library of volatile compounds, the yeast can be exposed to air or other gas mixtures comprising the compound, or the compound can be exposed to a solution or suspension of the volatile compound in the yeast culture media (for example, the compound can be dissolved in the yeast culture media), if the compound is water soluble or water-immiscible respectively, or a suitable substrate may be soaked in the compound and placed over the yeast in culture, or any other suitable means can be used.

[0746] In some embodiments, a mixture of test compounds may be used or the test compound may be present in a complex mixture of compounds, only some of which are relevant to the purpose of the screen. Such mixtures potentially include expired human breath, saliva, urine, serum, plasma, whole blood, tears, sweat, faeces and a range of other biological specimens, as well as other types of mixtures such as beverages and wine.

[0747] In certain embodiments, the test compounds are exogenously added to the yeast cells expressing a recombinant receptor and compounds that modulate signal transduction via the receptor are selected. In other embodiments, the yeast cells also express the compounds to be tested.

[0748] In one embodiment, multiple independent clones of transformed yeast are tested for each receptor of interest. They may be screened as a single clone per well or multiple clones may be combined in a single well.

### Detection of Cyclohexanone

[0749] Cyclohexanone is a marker for some explosives, and hence it is desirable to have means for detecting this molecule.

[0750] As shown herein, both Str-144 (SEQ ID NO: 26) and Srj-22 (SEQ ID NO: 287) bind cyclohexanone. Thus, these polypeptides (receptors), or cyclohexanone binding variants thereof, can be used in methods for detecting cyclohexanone.

[0751] As the skilled person would appreciate, a wide variety of different detection systems can be used to detect a ligand binding a receptor protein.

[0752] In one embodiment, the method relies on detecting resonance energy transfer (RET) using, for example, bioluminescent resonance energy transfer (BRET) or fluorescence resonance energy transfer (FRET).

[0753] Light-emitting systems have been known and isolated from many luminescent organisms including bacteria, protozoa, coelenterates, molluscs, fish, millipedes, flies, fungi, worms, crustaceans, and beetles, particularly click beetles of genus Pyrophorus and the fireflies of the genera Photinus, Photuris, and Luciola. Additional organisms displaying bioluminescence are listed in WO 00/024878, WO 99/049019 and Viviani (2002).

[0754] One very well known example is the class of proteins known as luciferases which catalyze an energy-yielding chemical reaction in which a specific biochemical substance, a luciferin (a naturally occurring fluorophore), is oxidized by an enzyme having a luciferase activity (Hastings, 1996). A great diversity of organisms, both prokaryotic and eukaryotic, including species of bacteria, algae, fungi, insects, fish and other marine forms can emit light energy in this manner and each has specific luciferase activities and luciferins which are chemically distinct from those of other organisms. Luciferin/luciferase systems are very diverse in form, chemistry and function. Examples of bioluminescent proteins with luciferase activity may be found in U.S. Pat. Nos. 5,229,285, 5,219,737, 5,843,746, 5,196,524, and 5,670,356. Two of the most widely used luciferases are: (i) Renilla luciferase (from R. reniformis), a 35 kDa protein, which uses coelenterazine as a substrate and emits light at 480 nm (Lorenz et al., 1991); and (ii) Firefly luciferase (from Photinus pyralis), a 61 kDa protein, which uses luciferin as a substrate and emits light at 560 nm (de Wet et al., 1987).

[0755] Gaussia luciferase (from Gaussia princeps) has been used in biochemical assays (Verhaegen et al., 2002). Gaussia luciferase is a 20 kDa protein that oxidises coelenterazine in a rapid reaction resulting in a bright light emission at 470 nm.

[0756] Luciferases useful for the present invention have also been characterized from Anachnocampa sp (WO 2007/019634). These enzymes are about 59 kDa in size and are ATP-dependent luciferases that catalyze luminescence reactions with emission spectra within the blue portion of the spectrum.

[0757] Alternative, non-luciferase, bioluminescent proteins that can be employed in this invention are any enzymes which can act on suitable substrates to generate a luminescent signal. Specific examples of such enzymes are β-galactosidase, lactamase, horseradish peroxidase, alkaline phophatase, β-glucuronidase and β-glucosidase. Synthetic luminescent substrates for these enzymes are well known in the art and are commercially available from companies, such as Tropix Inc. (Bedford, Mass., USA).

[0758] An example of a peroxidase useful for the present invention is described by Hushpulian et al. (2007).

[0759] The choice of the substrate can impact on the wavelength and the intensity of the light generated by the bioluminescent protein. A widely known substrate is coelenterazine which occurs in cnidarians, copepods, chaetgnaths, ctenophores, decapod shrimps, mysid shrimps, radiolarians and some fish taxa (Greer and Szalay, 2002). For Renilla luciferase for example, coelenterazine analogues/derivatives are available that result in light emission between 418 and 512 nm (Inouye et al., 1997). A coelenterazine analogue/derivative (400A, DeepBlueC) has been described emitting light at 400 nm with Renilla luciferase (WO 01/46691). Other examples of coelenterazine analogues/derivatives are EnduRen and ViviRen.

[0760] As used herein, the term “luciferin” refers to a class of light-emitting biological pigments found in organisms capable of bioluminescence, which are oxidised in the presence of the enzyme luciferase to produce oxyluciferin and energy in the form of light. Luciferin, or 2-(6-hydroxybenzothiazol-2-yl)-2-thiazoline-4-carboxylic acid, was first isolated from the firefly Photinus pyralis. Since then, various forms of luciferin have been discovered and studied from various different organisms, mainly from the ocean, for example fish and squid, however, many have been identified in land dwelling organisms, for example, worms, beetles and various other insects (Day et al., 2004; Viviani, 2002).

[0761] There are a number of different acceptor molecules that can be employed in this invention. The acceptor molecules may be a protein or non-proteinaceous. Examples of acceptor molecules that are protein include, but are not limited to, green fluorescent protein (GFP), blue fluorescent variant of GFP (BFP), cyan fluorescent variant of GFP (CFP), yellow fluorescent variant of GFP (YFP), enhanced GFP (EGFP), enhanced CFP (ECFP), enhanced YFP (EYFP), GFPS65T, Emerald, Topaz, GFPuv, destabilised EGFP (dEGFP), destabilised ECFP (dECFP), destabilised EYFP (dEYFP), HcRed, t-HcRed, DsRed, DsRed2, t-dimer2, t-dimer2(12), mRFP1, pocilloporin, Renilla GFP, Monster GFP, paGFP, Kaede protein or a Phycobiliprotein, or a biologically active variant or fragment of any one thereof. Examples of acceptor molecules that are not proteins include, but are not limited to, Alexa Fluor dye, Bodipy dye, Cy dye, fluorescein, dansyl, umbelliferone, fluorescent microsphere, luminescent microsphere, fluorescent nanocrystal, Marina Blue, Cascade Blue, Cascade Yellow, Pacific Blue, Oregon Green, Tetramethylrhodamine, Rhodamine, Texas Red, rare earth element chelates, or any combination or derivatives thereof.

[0762] One very well known example is the group of fluorophores that includes the green fluorescent protein from the jellyfish Aequorea victoria and numerous other variants (GFPs) arising from the application of molecular biology, for example mutagenesis and chimeric protein technologies (Tsien, 1998). GFPs are classified based on the distinctive component of their chromophores, each class having distinct excitation and emission wavelengths: class 1, wild-type mixture of neutral phenol and anionic phenolate:class 2, phenolate anion:class 3, neutral phenol:class 4, phenolate anion with stacked s-electron system:class 5, indole:class 6, imidazole:and class 7, phenyl.

[0763] A naturally occurring acceptor molecule which has been mutated (variants) can also be useful for the present invention. One example of an engineered system which is suitable for BRET is a Renilla luciferase and enhanced yellow mutant of GFP (EYFP) pairing which do not directly interact to a significant degree with one another alone in the absence of a mediating protein(s) (in this case, the G protein coupled receptor) (Xu et al., 1999).

[0764] In another embodiment, the acceptor molecule is a fluorescent nanocrystal. In an alternate embodiment, the acceptor molecule is a fluorescent microsphere.

[0765] In an embodiment, the receptor is labelled as generally described in WO 2010/085844. For instance, a) a bioluminescent protein is incorporated into the fifth non-transmembrane loop of the receptor, and an acceptor molecule incorporated into the C-terminus of the receptor, or b) the acceptor molecule forms part of the fifth non-transmembrane loop of the receptor, and the bioluminescent protein forms part of the C-terminus. Upon cyclohexanone binding the labelled receptor, in the presence of a substate for the bioluminescent protein, a modulation in BRET between the bioluminescent protein and the acceptor molecule occurs due to the spatial location and/or dipole orientation of the bioluminescent protein relative to the acceptor molecule being altered.

[0766] In a further embodiment of the method described in WO 2010/085844, the bioluminescent protein is a Renilla luciferase or a biologically active variant (such as RLuc2 or RLuc8) or fragment thereof, the acceptor molecule is green fluorescent protein 2 (GFP²), and the substrate is Coelenterazine 400a.

[0767] The labelled receptor may be present in a cell-free composition comprising the receptor embedded in a lipid bilayer, such as a liposome or a cell membrane preparation (for instance a yeast cell membrane preparation).

[0768] In a further embodiment, the method of detecting cyclohexanone of the invention is performed using microfluidics. For instance, the methods described in WO 2013/155553 can be used to detect cyclohexanone. More specifically, a sample which may comprise cyclohexanone is flowed through a microfluidic device comprising one or more microchannels along with a) the receptor labelled with a chemiluminescent donor domain and an acceptor domain, wherein the separation and relative orientation of the chemiluminescent donor domain and the acceptor domain, in the presence and/or the absence of cyclohexanone, is within ±50% of the Forster distance, and b) a substrate of the chemiluminescent donor. The labelled receptor molecule, sample and substrate are mixed in the device, wherein the spatial location and/or dipole orientation of the chemiluminescent donor domain relative to the acceptor domain is altered when the cyclohexanone binds the labelled polypeptide. Any modification of the substrate by the chemiluminescent donor is detected using an electro-optical sensing device.

[0769] Other examples of systems which can be used to detect resonance energy transfer (RET) as a result of cyclohexanone being a labelled polypeptide (receptor) as defined herein can be those generally described in WO 2004/057333.

[0770] Alternatively, the labelled receptor may be present in the cell membrane of an intact cell. Any cell expression system can be used, e. g., yeast, or mammalian (for example HEK293, CHO or COS cells) cell expression systems. Cells that normally express odorant receptors can be used. Isolation and/or culturing of such cells and their transformation with the olfactory receptor-expressing sequences of the invention can be done with routine methods (Vargas, 1999; Coon et al., 1989).

[0771] Several methods of measuring G-protein activity are known to those of skill in the art and can be used in conjunction with the methods of the present invention, including but not limited to measuring calcium ion or cyclic AMP concentration in the cells. Such methods are described in Howard et al. (2001), Krautwurst et al. (1999), Chandrashekar et al. (2000), Oda et al. (2000) and Kiely et al. (2007).

[0772] To evaluate electrophysiologic effects of cyclohexanone binding to cell-expressed receptor, patch-clamping of individual cells can be done. Patch-clamp recordings of the receptor cell membrane can measure membrane conductances. Some conductances are gated by odorants in the cilia and depolarize the cell through cAMP- or IP3-sensitive channels, depending on the species. Other conductances are activated by membrane depolarization and/or an increased intracellular Ca²⁺ concentration (Trotier, 1994).

[0773] Changes in calcium ion levels in the cell after exposure of the cell to cyclohexanone can be detected by a variety of means. For example, cells can be pre-loaded with reagents sensitive to calcium ion transients. Techniques for the measurement of calcium transients are known in the art. For example, Kashiwayanagi (1996) measured both of inositol 1,4,5-trisphosphate induces inward currents and Ca2+ uptake in frog olfactory receptor cells.

[0774] In certain specific embodiments, intracellular calcium concentration is measured by using a Fluorometric Imaging Plate Reader (“FLIPR”) system (Molecular Devices, Inc.). Other physiologic activity mechanisms can also be measured, e.g., plasma membrane homeostasis parameters (including lipid second messengers), and cellular pH changes (see, e.g., Silver, 1998).

[0775] Alternatively, in vitro synthesised mRNA coding for the receptor can be injected into Xenopus oocytes allowing electrophysiological or calcium imaging of cyclohexanone driven cell excitation.

[0776] In a further example, cyclohexanone is detected using a method relying on yeast cells, and methods of using such yeast cells, of the invention (see, for instance, Example 3).

### EXAMPLES

### Example 1

### Production of Nematode GPCR Library in Yeast

### Yeast Strain

[0777] The genotype of the parental strain of haploid yeast (Saccharomyces cerevisiae) that was used was: BY4741; MATa; his3Δ1; leu2Δ0; met15Δ0; ura3Δ0; ste2::kanMX4.

[0778] In order to make the screening system sensitive and robust, it is important to knock out the sst-2 gene to increase the sensitivity of the MAP kinase transduction cascade and the far-1 gene to avoid cell death due to overstimulation of this transduction pathway (FIGS. 1 to 3). The endogenous Ga (gpa-1) gene must also be deleted so that its protein does not compete with exogenous Ga subunits for access to Gβγ. ste-2, sst-2 and far-1 can be knocked out without any detrimental effect on the phenotype of the strain. However, gpa-1 is an essential gene that is required for yeast viability, as the absence of GPA1 protein would lead to free Gβγ, activating the transduction pathway and resulting in growth arrest at G1. Therefore, the inventors replaced the endogenous Gα (gpa-1) with a chimaeric Gβγ by replacing the last five amino acids of the yeast gpa-1 with the corresponding amino acids from a nematode olfactory Gα (odr-3, KAGGM) using homologous recombination.

[0779] The final strain was called Cyb-KAGMM.

### Selection of Appropriate Promoters for Reporters of Nematode Chemosensory G-Protein Coupled Receptor Activation

[0780] The FUS-1 promoter has commonly been used to drive expression of reporters in response to activation of the MAP kinase transduction pathway by heterologously expressed GPCRs. However, in the system the inventors have identified for nematode chemoreceptors, reporter expression was leaky (see, for example, FIGS. 5 to 7). This is particularly problematic for a screening assay because a high and/or varying background compromises the discriminating power of the assay. For example, leaky expression decreases the z-factor, which is a quantitative measure of the quality of the assay.

[0781] The inventors therefore tested the FIG-1 and FIG-2 promoters, other MAP-kinase dependent promoters, which significantly reduced background leaky expression of the reporter gene as shown in FIGS. 7a and 7b. This was a surprising advantage of the FIG-1 and FIG-2 promoters that the inventors had not been led to expect from their knowledge of the prior art.

### Selection of Promoter for Expression of Nematode Chemosensory G-Protein Coupled Receptor

[0782] The inventors investigated suitable promoters for reliably expressing nematode chemosensory GPCRs. The inventors picked two strong promoters: the galactose-inducible GAL-1 promoter, as used by Minic et al. (2005) for expressing the rat 17 olfactory receptor and the constitutive PGK-1 promoter used by Dowell's group (Dowell and Brown, 2002 and 2009) for non-chemosensory mammalian GPCRs. Glucose was used as carbon source for the system using the PGK-1 promoter, whereas a raffinose/galactose mixture was used to induce the GAL-1 promoter, following standard protocols.

[0783] Surprisingly in the light of the nearest prior art (Minic et al, 2005), using the GAL-1 promoter the inventors were unable to observe reproducible ODR-10 expression by western blotting nor could they reproducibly generate a functional receptor response using this promoter (results not shown), but when expressed under the control of the constitutive PGK-1 promoter the inventors were able to observe consistent expression of a GFP² labelled variant of ODR-10 using laser confocal microscopy (FIG. 4). The inventors therefore proceeded to test the system with positive and negative control receptors and both a known ligand (diacetyl) and a known non-ligand (acetoin).

### Cloning of Nematode Chemosensory G-Protein Coupled Receptors

[0784] Receptor cDNAs were inserted into a Gateway® pENTR vector and thence into a modified Gateway® pDEST-His plasmid under the control of the PGK-1 promoter as mentioned above. To confirm proper functioning of this system it was tested with odr-10 cDNA in the Cyb-KAGMM yeast strain. ODR-10 is a nematode chemoreceptor GPCR that responds selectively and with high affinity to butane-2,3-dione (diacetyl). The H110Y variant of ODR-10 bears a single point mutation that ablates diacetyl 30 responsiveness. It is therefore an excellent negative control and surrogate for other non-responding GPCRs. The inventors cloned both wild type and H110Y mutant variants of odr-10 cDNA into the Gateway® cassette downstream of the PGK-1 promoter. GFP and LacZ reporters were cloned under either the FIG-2 or FUS-1 promoters in a pESC-Leu plasmid. The gpa-1/odr-3 chimaera, which contains the last five amino acids of nematode ODR-3, was chromosomally integrated at the gpa-1 locus.

[0785] The precise methodology was as follows:

### Growth

[0786] A single colony was picked and inoculated into 10 mL of standard yeast drop-out selection medium (SD) without leucine and histidine and supplemented with 2% (w/v) glucose. This was incubated for 16 hrs at 30° C. with 180 rpm shaking in a 50 mL Falcon tube.

### Assessment of Alternative Reporters

### i) GFP²

[0787] GFP has been used successfully as a reporter for some mammalian GPCRs (Fukutani et al., 2012). If feasible it has the advantage of providing a simple readout with no need for workup after induction/expression.

[0788] The cells were adjusted to give an ABS_{600 nm}≈1. Diacetyl was added at a concentration in the range of 1-1000 μM in 1 mL of medium in a 2 mL or larger tube, and shaken for 7 hrs at 30° C. at 130 rpm before being scanned for fluorescence emission between 450 and 650 nm with 420 excitation wavelength for GFP. However, GFP expression was very variable between biological repeats of the same experiment as shown in FIG. 5. Furthermore, even in the best case (FIG. 5a) there was less than a twofold difference between the peak GFP responses to 500 μM diacetyl with ODR-10 expression and for the vector control. The combination of variability and narrow dynamic range of the responses, even in this ideal situation with a known ligand and receptor pair, would make practical use of such an assay for ligand discovery with a variety of receptors, impractical or impossible.

### ii) Lac-Z

[0789] The inventors also tested the suitability of the Lac-Z marker, which encodes β-galactosidase and therefore requires an enzymatic development step after induction/expression. The inventors repeated the same growth and induction procedure but after the 7 hrs induction, one of the following protocols was performed:

[0790] a) X-Gal Workup

[0791] Colour was developed using the HTX Kit (Cat #P01002) from Dualsystems Biotech according to their instructions.

[0792] b) ONPG Workup
[0793] The cells were centrifuged and the supernatant was discarded.
[0794] 100 μl of 100 mM sodium phosphate buffer, pH 7.5, containing 0.1% sodium dodecyl sulphate was added to the tubes
[0795] The tubes were shaken at 200 rpm for 10 min at room temperature.
[0796] One quarter volume of 2.5 mM ortho-nitrophenyl-βD-galactopyranoside (ONPG) was added at room temperature to give a final ONPG concentration of 0.5 mM.
[0797] The reaction was stopped by adding 1M Na₂CO₃ to a final concentration of 0.3M.
[0798] Absorbance was measured at 414 nm.

[0799] The assays performed with LacZ under the control of either FUS-1 or FIG-2 promoters both gave strong signals that were easily distinguishable by eye from controls (FIGS. 6 and 7) and that were reproducible across biological repeats carried out on separate days (results not shown). Both X-gal (FIG. 6) and ONPG (FIG. 7) substrates gave measurable signals. However, ONPG is a more cost effective substrate and quantitative experiments were therefore carried out with that substrate. The maximum increase in signal, observed with 700 μM diacetyl when driven by FUS-2, was approximately 6 fold higher than background. The background was very stable (FIG. 8). Under the FUS-1 promoter the maximum ligand-induced increase in signal occurred at 1 mM and was only a factor of approximately 2.5 fold (FIG. 9). Furthermore, the background was higher and more variable.

### Nematode Chemoreceptor Gene Library for Screening

[0800] A large library of C. elegans receptors that can be screened for responses to explosive targets has been constructed. Five putative chemoreceptor subfamilies containing a putative 578 receptors were selected as source material for the library (FIG. 10).

[0801] The sequences of these genes were accessed from the online database for C. elegans: Wormbase. In order to clone each individual gene, total RNA from a mixed life stage culture of C. elegans was prepared using commercially available RNA extraction kits. cDNA was prepared using Invitrogen's superscript III reverse transcriptase. Primers for the amplification of each individual gene were designed to include the ATG start codon (forward primer) and the STOP codon (reverse primer) to ensure the full gene is amplified. A proof reading polymerase was used in standard PCR reactions to amplify the genes.

[0802] Amplification products of appropriate size were cloned into pENTR/D-TOPO vector using Invitrogen's Gateway® cloning system. The Gateway® system is highly efficient and circumvents limitations of traditional restriction enzyme cloning as well as enabling simple sub-cloning into a multitude of vectors for different downstream scientific studies.

[0803] The inventors were surprised to find that transcription of C. elegans putative chemoreceptor GPCRs is quite promiscuous, with many splice variants of genes present in cDNA samples. In order to ensure the correct sequence is cloned, multiple colonies were picked for each gene and their correct insert size was checked by restriction digestion. The sequences of correctly sized clones were compared back to the available sequence on Wormbase and error free clones were selected for inclusion in the C. elegans chemoreceptor library.

[0804] Sequences and detailed information for each clone were recorded electronically and clones were stored at −20° C. A total of 297 error free receptor clones were isolated from the pool of 578, which represents the majority of expressed, accessible and useful sequences within the str subfamily.

[0805] The sub-cloning of the receptors from the pENTR D Topo vector into a yeast expression vector was completed. The expression vector was designated pDEST PGK-HIS. It is based on the yeast expression vector pESC-HIS (Stratagene) wherein the GAL1 and GAL10 promoters were replaced with a single (700 bp) yeast PGK promoter, and a Gateway® attR1-attR2 cassette was inserted immediately downstream of the PGK promoter. Transfer was accomplished using a standard Gateway® LR Clonase reaction according to InVitrogen's instructions.

[0806] Duplicate independent clones of yeast transformed with 294 of the receptors were selected onto 8×96 position master plates (up to 37 receptors, in duplicate, per plate with room for positive and negative controls). Seven of eight master plates have been transferred to 96 well screening plates, along with positive and negative controls and screened against at least one chemical target.

### Example 2

### Screening of Nematode GPCR Library in Yeast

[0807] In order to be viable for screening multiple receptors against a single chemical or a mixture of chemicals simultaneously, or a single receptor against multiple chemicals or mixtures, it is convenient and efficient to perform the assay in a multiwell plate format, for example 48, 96, 384 or other higher density formats. As proof of principle, the inventors performed a control assay in 48 and 96 well formats.

### Method

[0808] The method was as follows (adpated from Brouchon-Macari et al., 2003):
[0809] 1 mL of Saccharomyces cerevisiae Minimal Medium (SCMM)-His, -Leu was inoculated with a single colony of the screening strain transformed with odr-10 (lacZ/Odr10/gpa1-KAGMM/ste2⁻sst2⁻far1³¹ gpa1⁻) at Abs_{600 nm}=1, in a 96-well deep well plate.
[0810] The plate was incubated overnight (18 hours) at 30° C. with shaking at 900 rpm.
[0811] The culture from the well was diluted into fresh wells (96 or 48 well plate) to a final volume of 1 mL at the following yeast cell optical densities:
   [0812] 1. Abs₆₀₀=1
   [0813] 2. Abs₆₀₀=0.5
   [0814] 3. Abs₆₀₀=0.5
[0815] Wells 1 and 2 above were induced with 500 μM of a diacetyl solution (made up fresh and kept on ice); 1M: 87 μL diacetyl+913 μL water; then diluted 1/10 in water and 5 μL added to 1 mL cells for a final concentration of 500 μM). All wells were incubated for 30° C. for 18 hours with shaking at 900 rpm.
[0816] The plate was centrifuged to pellet the cells, the supernatant was aspirated off and discarded and the pellet was resuspended in 120 μL of lysis buffer (100 mM sodium phosphate buffer, pH 7.5 (consisting of 82 mM Na₂HPO₄ and 12 mM NaH₂PO₄ with 0.1% (w/v) sodium dodecyl sulfate). Initial absorbance was read at 414 nm in a plate-reading spectrophotometer.
[0817] The plate was shaken at 900 rpm for 10 min at 30° C.
[0818] Thirty microlitres of 2.5 mM o-nitrophenyl-β-D-galactopyranoside (ONPG) (10 mg ONPG dissolved in 130 μL dimethyl formamide is 250 mM, then dilute 1/100 in water for final concentration, which is 2.5 mM) was added and the plate was incubated at room temperature for between 5 minutes and 3 hours.
[0819] Eighty microlitres of a 1M Na₂CO₃ solution was added and the absorbance was read in a plate-based spectrophotometer, either at 414 nm or a spectrum was recorded for each well over the visible region.

### Results

[0820] In some cases, colour development was visible by eye as early as five minutes after adding substrate. Abs₄₁₄ readings after 3 hours were: 0.247 for the Abs_{600 nm}=1 starting condition+diacetyl, 0.521 for the Abs_{600 nm}=0.5 starting condition+diacetyl and 0.165 for the Abs_{600 nm}=0.5 starting condition with no added diacetyl.

[0821] The assay was repeated with a range of different dilutions (¼ to 1/20) of the starting yeast culture in the wells of either 96 or 48 deep-well plates (the former can contain a total of 2 mL and the latter 5 mL.) Normally dilutions required to reach Abs_{600 nm}=1 are in the range of ½ to ¼. This experiment probed a set of higher dilutions. Incubation was for 17 hours at 30° C. and 900 rpm shaking. Diacetyl induction of lacZ was detected in all the conditions except the 1/20 cell dilution in the 48 well plate. 96 well plates consistently gave higher diacetyl-induced to control Abs_{414 nm} ratios at all dilutions than 48 well plates. In 96 well plates, the higher cell dilutions consistently gave the better diacetyl-induced to control ratios (FIG. 11). The best ratio was in the case of the 96-well plate and the 1/20 dilution where the diacetyl-induced absorbance was 0.481 and the uninduced control was 0.079.

### Conclusion

[0822] The present inventors tested a large number of published procedures and were surprised to find none were useful for producing yeast where ligand induced binding to heterologously expressed nematode GPCRs produced a suitably reliable and sensitive signal through a reporter. Examples of previously published procedures that did not work included that described by Minic et al. (2005) with a chimeric Gα, Gal inducible promoters for the receptors, nematode Gα replacing yeast Gα, and having the nematode GPCR cassette and the reporter construct on the same plasmid, whereas the use of GFP as a reporter was very unreliable and the commonly used FUS-1 as a promoter for the reporter resulted in a weak signal and higher background. As a result, a new assay had to be developed to meet the inventor's requirements as to reliability and sensitivity. In this regard, initial experiments have shown a z factor of 0.94 which is excellent and surprising.

### Example 3

### Screening of Nematode GPCR Library in Yeast to Cyclohexanone

[0823] In order to screen multiple nematode GPCRs against cyclohexanone simultaneously, a high throughput 96-well plate assay was designed.

### Method

[0824] The method was adapted from (Brouchon-Macari et al., 2003).

[0825] 500 μL aliquots of Saccharomyces cerevisiae Minimal Medium (SCMM)-Urea,-His,-Leu (SCMM-UHL) containing 2% glucose, were inoculated with single colonies of the screening strain transformed with selected nematode GPCRs (pFIG2:LacZ/pPGK:GPCRx/gpal-KAGMM/ste2-sst2- far1- gpa1-) in a 96-well deep well plate. Colonies H9, H10 were positive controls transformed with odr-10, which responds to diacetyl; H11 and H12 were negative controls transformed with mutated odr-10, which does not respond to diacetyl.

[0826] The plate was incubated overnight (24 hours) at 30° C. with shaking at 1000 rpm.

[0827] Each culture was diluted 1:10 into fresh wells of a 96-well plate to a final volume of 1 mL.

[0828] All wells, except control wells H9-12, were induced with 5 mM cyclohexanone (51.77 μL cyclohexanone was added into 100 mL SCMM-U-H-L medium containing 2% glucose). As control, H9-12 was induced with 500 μM diacetyl (1 M diacetyl was prepared fresh, 8.7 μL diacetyl+91.3 μL water, then dilute 1:100 in water and add 50 μL to 1 mL cells for 500 μM final). All wells were incubated at 30° C. for 18 hours with shaking at 1000 rpm.

[0829] The plate was centrifuged (1500×g, 5 min), the supernatant was discarded and the pellet was resuspended in 120 μL of lysis buffer [100 mM sodium phosphate buffer, pH 7.5 (consisting of 82 mM Na2HPO4 and 12 mM NaH2PO4) containing 0.1% (w/v) sodium dodecylsulfate (SDS)]. The plate was shaken at 1000 rpm for 10 min at 30° C.

[0830] 40 μL of 2.5 mM o-nitrophenyl-β-D-galactopyranoside (ONPG) was added and the plate was incubated at room temperature for 10 min. 80 μL 1 M Na2CO3 solution was added to stop the reaction. The plate was centrifuged (1500×g, 5 min) and 100 μL of supernatant was carefully pipetted off each well to the wells of a fresh transparent 96-well plate. The key to the different well is provided in Table 2.

[0831] Results were recorded photographically and the spectrum of every well was recorded with a plate-reading spectrophotometer over the 380 nm to 500 nm region of the visible light spectrum.

### Results

[0832] Yellow colour was observed in wells B7, D2 and H9 (FIG. 12), indicating they were induced by the tested ligands. Spectra reading from 380 nm to 500 nm were measured and analyzed (FIG. 13). The spectra of B7, D2 and H9 showed clear peaks at 420 nm, which were not observed from other wells.

[0833] As expected, positive control H9 (odr-10) responds to diacetyl, therefore showed yellow color and the spectra peak at 420 nm. Unlike H9, the other positive control H10 did not show any response (color or spectra) to diacetyl in this assay. This reflects the inventors' regular observation that different clonal yeast lines, transformed with the same receptor, can show different responses to an inducing ligand. It also explains why the inventors chose to screen two independent clones for all of the receptors in our library. As mentioned elsewhere herein, there would be advantages in screening a larger number of clones for each receptor if this could be managed logistically.

TABLE 2
Example of receptor assignments for plate 3 of the nematode GPCR
screenable library. Wells F7-12, G7-12, H7 and H8 are empty to avoid the control
wells (H9-12) being contaminated by the ligand used in the other wells and vice versa.

| | 1 | 2 | 3 | 4 | 5 | 6 | 7 | 8 | 9 | 10 | 11 | 12 |
|---|---|---|---|---|---|---|---|---|---|---|---|---|
| A | Odr10 | Odr10 | Odr10 | Odr10 | Str130 | Str130 | Str131 | Str131 | Str134 | Str134 | Str135 | Str135 |
| | | | mut | mut | | | | | | | | |
| B | Str139 | Str139 | Str141 | Str141 | Str143 | Str143 | Str144 | Str144 | Str146 | Str146 | Str148 | Str148 |
| C | Srj8 | Srj8 | Srj9 | Srj9 | Srj11 | Srj11 | Srj14 | Srj14 | Srj15 | Srj15 | Srj19 | Srj19 |
| D | Srj22 | Sr122 | Sri26 | Srj26 | Srj27 | Srj27 | Srj37 | Srj37 | Srd1 | Srd1 | Srd3 | Srd3 |
| E | Srd5 | Srd5 | Srd9 | Srd9 | Srd10 | Srd10 | Srd11 | Srd11 | Srh15 | Srh15 | Srh17 | Srh17 |
| F | Srh149 | Srh149 | Srh159 | Srh159 | Srh166 | Srh166 | | | | | | |
| G | Srh167 | Srh167 | Sri51 | Sri51 | Sri54 | Sri54 | | | | | | |
| H | Sri57 | Sri57 | Sri60 | Sri60 | Sri63 | Sri63 | | | Odr10 | Odr10 | Odr10 | Odr10 |
| | | | | | | | | | | | mut | mut |

“Odr-10 mut” is the odr-10 non-functional mutant H110Y.

[0834] As expected, negative control H11 and H12 (the mutated odr-10) did not show any response to 500 μM diacetyl (FIG. 13). Well G5 is an example of a well that did not show any peak in the spectra either (FIG. 13). Conversely, well B7 and D2 showed clear responses to cyclohexanone. According to Table 2, well B7 contains the yeast strain transformed with nematode GPCR Str144 and D2 is the yeast strain transformed with GPCR Srj22. This assay was repeated at least three times and the results were found to be consistent.

### Conclusion

[0835] In this example, the inventors did not only identify the candidate GPCRs for sensing cyclohexanone, but also successfully demonstrated a high throughput assay to screen multiple nematode GPCRs in yeast to the interest chemical compounds. Beside eye observation of the color change, the inventors also developed a reliable spectra analysis method to analyze this assay results and help identify the candidate receptors for the interested ligands.

### Example 4

### Other Markers

[0836] The inventors also envisage an assay of the type described above, wherein the reporter gene, rather than being lacZ or another visible marker, is a selectable growth marker such as a nutritional marker or antibiotic resistance marker, possibly selected from LEU2, TRP1, HIS3, HIS4, URA3, URA5, SFA1, ADE2, MET15, LYS5, LYS2, ILV2, FBA1, PSE1, PDI1 and PGK1, that is required for yeast growth in the screening buffer. In this case multiple independent clones of a single receptor sequence would be placed into each of the screening wells. On induction, only those clones capable of a positive response would grow and the extent of any growth would be an indication of a ligand-receptor “hit”. Such an arrangement would have the additional benefits, over the other examples shown here, of allowing greater clonal diversity to be screened simultaneously and also permitting the screening of up to at least 74 different receptor types per 96 well plate rather than the 37 demonstrated in Example 3.

[0837] The present application claims priority from AU2013901329 filed 16 Apr. 2013, and AU 2013901925 filed 30 May 2013, the entire contents of both of which are incorporated herein by reference.

[0838] It will be appreciated by persons skilled in the art that numerous variations and/or modifications may be made to the invention as shown in the specific embodiments without departing from the spirit or scope of the invention as broadly described. The present embodiments are, therefore, to be considered in all respects as illustrative and not restrictive.

[0839] All publications discussed and/or referenced herein are incorporated herein in their entirety.

[0840] Any discussion of documents, acts, materials, devices, articles or the like which has been included in the present specification is solely for the purpose of providing a context for the present invention. It is not to be taken as an admission that any or all of these matters form part of the prior art base or were common general knowledge in the field relevant to the present invention as it existed before the priority date of each claim of this application.

### REFERENCES

[0841] Aho et al. (1997) Anal. Biochem. 253:270-272.
[0842] Brouchon-Macari et al. (2003) BioTechniques 35:446-448.
[0843] Brown et al. (2000) Yeast 16:11-22.
[0844] Chandrashekar et al. (2000) Cell 100: 703-711.
[0845] Christianson et al. (1992) Gene 110:119-122.
[0846] Coon et al. (1989) Proc. Natl. Acad. Sci. USA 86:1703-1707
[0847] Cuppen et al. (2003) Comp Funct Genomics 4:479-491.
[0848] Day et al. (2004) Luminescence 19:8-20.
[0849] de Wet et al. (1987) Mol. Cell. Biol. 2987:725-737.
[0850] Dowell and Brown (2002) Receptors and Channels 8:343-352.
[0851] Dowell and Brown (2009) G-Protein Coupled Receptors in Drug Discovery: Methods in Molecular Biology 552:213-229.
[0852] Erb et al. (1994) Proc. Natl. Acad. Sci. USA 91:11422.
[0853] Fredriksson and Schioth (2005) Molecular Pharmacology 67:1414-1425.
[0854] Frishman and Argos (1997) Proteins 27:329-335.
[0855] Fukutani (2012) Biotechnology and Bioengineering 109:205-212.
[0856] Gallop et al. (1994) J. Med. Chem. 37:1233.
[0857] Greer and Szalay (2002) Luminescence 17:43-74.
[0858] Hastings (1996) Gene 173:5-11.
[0859] Harayama (1998) Trends Biotechnol. 16:76-82.
[0860] Hofmann and Stoffel (1993) Biol. Chem. 374:166.
[0861] Hofmann et al. (2009) Trends Biochem Sci 34:540-552.
[0862] Howard et al. (2001) Trends Pharmacol Sci. 22:132-140.
[0863] Hushpulian et al. (2007) Biotransformation 25:2-4
[0864] Iguchi et al (2010) J. Biochem. 147:875-884.
[0865] Inouye et al (1997) Biochem. J. 233:349-353.
[0866] Jansen et al. (1999) Nat. Genet. 21:414-419.
[0867] Kashiwayanagi (1996) Biochem. Biophys. Res. Commun. 225:666-671.
[0868] Kawai et al. (2010) Bioeng. Bugs 1:395-406.
[0869] Kiely et al. (2007) J Neurosci Methods 159:189-194
[0870] Klein et al. (1984) Biochim. Biophys. Acta 787:221-226.
[0871] Krautwurst et al. (1999) Cell 95:917-926
[0872] Lorenz et al (1991) Proc. Natl. Acad. Sci. USA 88:4438-4442.
[0873] Melcher et al. (2000) Gene 247:53-61.
[0874] Minic et al. (2005) FEBS Journal 272:524-537.
[0875] Needleman and Wunsch (1970) J. Mol Biol. 45:443-453.
[0876] Oda et al. (2000) J Biol Chem. 275:36781-36786
[0877] Oldham abd Hamm (2008) Nature 9:60-71.
[0878] Persson and Argos (1994) J. Mol. Biol. 237:182-192.
[0879] Piper and Curran (1990) Curr. Genet. 17:119-123.
[0880] Robertson (1998) Genome Research 8:449-463.
[0881] Robertson (2001) Chem. Senses. 26:151-159.
[0882] Trotier (1994) Semin. Cell Biol. 5:47-54
[0883] Tsien (1998) Ann. Rev. Biochem. 63:509-544.
[0884] Vargas (1999) Chem. Senses 24:211-216
[0885] Verhaegen et al. (2002) Anal. Chem. 74:4378-4385
[0886] Viviani (2002) Cell. Mol. Life Sci. 59:1833-1850.
[0887] von Heijne (1992) J.Mol.Biol. 225:487-494.
[0888] Xu et al. (1999) Proc. Natl. Acad. Sci. USA. 96:151-156.
[0889] Zhang et al. (1999). Journal of Biomolecular Screening 4:67-73.

The application's sequence listing, which the Patent Office published only in electronic form, follows.

SEQUENCE LISTING (606 sequences)

SEQ ID NO: 1 - protein, 361 aa, Caenorhabditis elegans
MAKESTVESDVMLDEPAFAVFYGILVLISDLLSLFFIFTIMTKSTADMKLFKFALLKLAICDLLLNFSTAILVTPDLLCPLSAVAVRSPIGGISEAHAFSTISLTIAIAITVFTSINDCCFLRVCIFYQWTHILKKIYSWRGALVFLTLNVVIVGILTLAVWFATSSNEEFLLVVSAENMTHALGKYASQSETVYFYVDIWKPKVVPLLLSVVVGLAAIYVSNLCGSRLVWKAIDRRKNNMSFKSYETHRHLTLLALFQNLIPAVVIAFPVFLVAFSFVMSYESDTFAELIKHFVTFVISIYPALSVMLSFIFIKPYRKYLFSLICSIPALRKKPSRVSDTQLSKKSSMGNEDYFDFVGYM

SEQ ID NO: 2 - protein, 345 aa, Caenorhabditis elegans
MDNFELIVFLTQRVCTILAFLIHFPLTLLILYKSPSSFGAYKYLLTYISIFELVYAVLDVLVSPQLYTHKSAFMLVLDSNKTFLPFWTLYPIDLLFCGMLGCSMAIFTINFIYRYLVMKGSELLKSFESSKLFIWIASPMVYSAIWMFITEMTLQGNPDTDKLLEDTFLKKQKISLSEVVYIGPNYYPEEGVIDWIPIIGMISLTLMIFVSVYSIIYFAVNSYVAMNKLVLTSVNSQRYKANQTELLNALVIQAIIPFALMHFPASIVFITPFFNCGNQTFARIFSVTVALYPVLDPLPTIFVVKCYRKAVIKYLNILFSFCSNQPTIVTEQHSSTSYKCPAITA

SEQ ID NO: 3 - protein, 335 aa, Caenorhabditis elegans
MCSTRWLELTYYAETIGFCLSISFNFILLLLISEMPKKIFGSYKYLMLSFSVLGMFYSCCNVLAKPNLYITDVSFAAFNILKNTGFSKSFGSIAIAIYSSCYGMMIVLLTINFYYRYLSVTCPAKLTRFSAKNSPIWVFLILFNSSTWFVLSYFVNGPTSMKDEILQPELLQAYCMQPEDYAYVGPQYFYKDEGEMKFHLPSWIASGGMAFTMFITNTLLTYFGIETYRHLNKIGSIAGIEYRELQRQLFRTLVIQTAIPMVFMYFPISCMFLFPIFGIKAESLANVVPIAVAIYPCFEPLAAMYCIKSFQKRIFSILTCNKFNKSMHSTVVPVI

SEQ ID NO: 4 - protein, 346 aa, Caenorhabditis elegans
MCSSLWLSLNSLAGYIGSCLSISCNFIVLLLISEMPKKVFGSYKYLMFTFSTVGIMFSCSDLILKPNMHVTNTSFILFTLLEHSGFSKPSGLLFLSFSDAFYRMIITLLAIHFLYRYLSVVRPFNMFIFSMKFAPLWILVLVFNFSMWTFCFYYLNGPSEMKDEEVIPEFLDVYCLHPNEYTYTGPHYYYTDNSTGKWKFHNPSFVAEGYTGGNVALTIISVAYFGYQTYQHLYKLGTMTSVNYREVHYQLFKTLLIQTIFPSLLVFFPAACLILFPAFGVGIGENANLLMISFSMYPCFEPLVAVCCIKSFRKRILGIFRCLTVRKSSQISNLSTVVVTGKVTCA

SEQ ID NO: 5 - protein, 342 aa, Caenorhabditis elegans
MCSSLWLESNFYAGNIGFGLSITFNLIVLVLISEMPKRIFGNYKYLMFAFSTVGIFFSCCDFFIKPNMHITKTSFIIFTDLKRSGYSYSTAQIALAILCSSYGLVLTMLAIHFFYRYLSVKSPSNLSIFSLKAAPIWVISLSVNFVIWFFCFFNLNSPSPMKDEELIPEFWEAYCLKSNEYTYTGPHYYYTDNSTGEWKFHIPSFVAEGYTAGNIAIAIILLSIFGVKTYNHLYKLGGMSSLNSREIQSQLFKTLVVQTIFPSIFLFFPVSCLVLFPVFGIRIGENANLIMISFSIYPCFEPLVAICCIKTFRRRLLGIVPCYKKNRVTRVSSQFYNQTTTT

SEQ ID NO: 6 - protein, 346 aa, Caenorhabditis elegans
MSGQLWLALVDAADMVGFTLTISINIILLGLIRTRGKTLGTYKYLMSFFSFFSIFYAIVESILRPIMHIENTTFFLISRKRFDYSTRLGKINSAFYCACFATSFVLSAVHFVYRYFAACKPNLLRLFNLPHLLLWPLMCSIPVTAWASVSYFLYPDTEYTEAAVTYVLKTHYEVIKKENVSYIAYVYYQYENGERHIYIKNLLGCFVHYFVMSMTFVVVFYCGFSTWWTIREHRGASDRTRHLHRQLFKALVFQTLVPSIFMYIPTGVMFIAPFFDINLNANANFIVFCSFLYPGLDPLILIFIIREFRVTILNIIRGNERGNAVGEAYSTSRIKSSQPAAVNLSG

SEQ ID NO: 7 - protein, 341 aa, Caenorhabditis elegans
MSDRHWLDITTYSDHIGFTISTIANFVLILLLVFRPTKSYGSYKYLMITFCVFSLFYTSIETFLRPLIHIYDNTIFVIQRKRFQYSEGTARAISSTYCGCYAMSFTLFAVHFVYRYYAACKPDNLRYFQGCYFVAWVFGAMAVAASWGFAAFILYPETERTRTALIHVIQTSYELDPEWVGNVPYSYWRTENGVEYLNPRNVIGIFQHGVIMILSFGTVFYCGFNTYKTLNGSLGVSEKTKEMHTQLFKALVLQTIIPTTLMYIPTTMLFVTPFVGLNIGCYGNITTATVHLYPGIDPVVLIFIIRDFRQTILRPFRCFYRSNSVENTATIRQYQQSSSKG

SEQ ID NO: 8 - protein, 348 aa, Caenorhabditis elegans
MSDIYWIQITEVCSFVGFMLSVLGNSTLLVLLSGKSIDGIGTYRYLMITFCVFSLLFTILEDFIRPLMHHYNNTIIVLQRKRFQFSDSTARILTVSYCGCFAMCFVMFAVHFIYRYLVACHPTKLHYFRPKNFIFWLSGMLFIAGSWVAIAYVFFQEDLETRTDLVFILSTCYNLTPDDVGHVPYAFYKTQGNTRVIRWDNMIGVIHHMIVMTISISAVFYFGIKTYTRIMSFKGKSQKTKDLQNQFFTALVAQTVVPLIFMFIPNMVLTTAALIDGTFGSWANITVVMNHLYPAADPFVILFIIKGFRNSIRNVIYRCTKTKKASVSSVVRGIEAQSKKQSFSRVDI

SEQ ID NO: 9 - protein, 351 aa, Caenorhabditis elegans
MSDIYWIQITEVCSFVGFMLSVLGNSTLLVLLSGKSIDGIGTYRYLMITFCVFSLLFTILEDFIRPLMHHYNNTIIVLQRKRFQFSDSTARILTVSYCGCFAMCFVMFAVHFIYRYLVACHPTKLHYFRPKNFIFWLSGMLFIAGSWVAIAYVFFQEDLETRTDLVFILSTCYNLTPDDVGHVPYAFYKTQGNTRVIRWDNMIGVIHHMIVMTISISAVFYFGIKTYTRIMSFKGKSQKTKDLQNQFFTALVAQTVVPLIFMFIPNMVLTTAALIDGTFGSWANITVVMNHLYPAADPFVILFIIKGFRNSIRRIPDVIYRCTKTKKASVSSVVRGIEAQSKKQSFSRVDI

SEQ ID NO: 10 - protein, 346 aa, Caenorhabditis elegans
MSESYVFWIHVTHFIPKLGFVTTFMSGLCLLFLNYFGAQKNFGSYKYLISAFTMLGMIFATVEIIVYPNVHNYKASFLFYSFEESFGLSGSWSRNIPLAGYTFFHSATMSLLSVHFIYRYWAVFDTNKLAYFNGCYSLIWFFYCAFFGFQYSLGTYFFLARDEITDEYLREDMLLRYNANISELPAMAIVAYDPVDGSVRWRNVMGIFNICSIVNFQYAIMFYCGWSMHTKMEDKIKNFSETLRKHHKQFFKTLVLQITTPTIILFIPITIIIFLPLFHLDVSLPSGVMLCSFTLYPAADSFIVMFVVSEYKNTVKRTRAAFSKGLKETIQFRVQPSGITSSRQIT

SEQ ID NO: 11 - protein, 338 aa, Caenorhabditis elegans
MCIPLEFQIIQVIGFILSEVFHFTLLFLIHTRATRHFGSYKLLMASFSIFSILYALVEVLTQPIMHISGTGLMLYVGTTFLPISKEFGHFIAAFYCSTFGICVLFLSAHFFYRYSAVCSPRLLRHLHGPKVLRLLMPVFFLGALMFLNVTWFGEPTEFKMHYMRESLKREYGDDSFEVGQISSVFYIYNSTGSLEFFWKDCLGMAVVYIILSISISTIIYFSLNIFRTVYRHTKHRKSKKNWEIHRQLFQTLIIQTLIPMCILFIPTGFLLTLPFFDVKYVGRVTNAPGVGASLYPALDALTAILMIREFRTAFKCRSQAPIMKISSIRDTMFTNFHS

SEQ ID NO: 12 - protein, 316 aa, Caenorhabditis elegans
MCIPLEFQIIQVIGFILSEVFHFTLLFLIHTRATRHFGSYKLLMASFSIFSILYALVEVLTQPIMHISGTGLMLYVGTTFLPISKEFGHFIAAFYCSTFGICVLFLSAHFFYRYSAVCSPRLLRHLHGPKVLRLLMPVFFLGALMFLNVTWFGEPTEFKMHYMRESLKREYGDDSFEVGQISSVFYIYNSTGSLEFFWKDCLGMAVVYIILSISISTIIYFSLNIFRTVYRHTKHRKSKKNWEIHRQLFQTLIIQTLIPMCILFIPTGFLLTLPFFDVKYVGRVTNAPGVGASLYPALDALTAILMIREFRTAFKC

SEQ ID NO: 13 - protein, 342 aa, Caenorhabditis elegans
MDKLIVSLQYSGFLGSIVLNALLLHLLFHKASSSFGRYKILMISFSIFAIFYSIVDVLTLPVIFAKGRSICVCSNGPLKLFRSIGVPLTAVYCGSFGLCISLLALHFFYRYIAVCKPEKMYYFDEKHICYTFVLSIFIFVAWTITTYFPMLPDEMREEYYSDVLMDNFLTDSHETSFLVMMYKTPPDRPEPVEWIYSQLLACGFMCFQMSTCSFVMLFCGYKAVVQMKHSEVHMSSKTRNLSRQLMMTLGAQTLLPFTTVFLPVGLIIVLPVFGIDVGVAANKTAAFLGIYPALDPMIAIFLIKDFRYFVFCRSESSYVSSALSLTSHPSKVFKIVKRNNAA

SEQ ID NO: 14 - protein, 339 aa, Caenorhabditis elegans
MNVKEVIQIIQYSGFVSAQIINVVLLYLLFFKANKKLGKYRVLMIVFSIFGMMYSLIEVLTFPVMFCKGRSLSICSDGPFTLKKSIGFPLIAVYCASFGMCISLLALHFYYRYIAVCRPDKLFYFDGNRILYCLSPCFLIFFVWTLNVFLFMKPDQEKEDYYYDVLMDGYGIDSHKVSFLSMMYKSPDTDTTPAHWNLFQLFGLAICCVIMTSCFSIIIFCGFKSWKQMKNCTTQMSKKTRELNRQLFLTLGIQTLLPLITMYLPGGCFILLPAFGIELGANANQTGAFIGVYPALDPFIAIFLIKDFRNYVFCKSLKLSRISTATENTKKSQSNMNAL

SEQ ID NO: 15 - protein, 343 aa, Caenorhabditis elegans
MEQTIQIIQFGGFFASQLTNGLLLYLLCRKTSKQFGRYRVLMISFSLSAMMYSVLDFLTLPIFVCKERSFCIVSSGMFTHDKYIGFPLIATTSGCFGLCLSVLALQFFYRYIAICKPEKLHIFNGKSIFYTSSPCFVLLFLCLIQAWFFMKPVPETQLHYQKIFRESFDMDSFDVAFVAMKYKSSPTESIPEHWNIQQVFGFLFCVVIMQSCVFAILFCGLRTFFYMKKFSFTMSQKTKELHRQLFFTLTLQTLLPGITMFIPVGSLIALPFFGVDLGLEVNKIGAFLGVYPALDPLIAIFLITDFRNFVLCLEKRTAYKIAAGLTGIESSTARRSSSMNQLR

SEQ ID NO: 16 - protein, 335 aa, Caenorhabditis elegans
MAVTPLLRICQLSAFSIATTANLLLLYLIKVRAGNSFGRYRVLMVSFSIYAIIYAFIEILTMPVLHIHKSGVLFYLDGVLKFQTTIGGFMSSLYCGSFALCISMLATHFIYRYVAVCRHGKLYYFDGIKIYNLFIPPTILFIVWTLSIYFNFGPNQIKKDFFRNITMQLYDEDIDKISFMGPLYFTRNEDGSCLFRFSDLLGATISCVIMTICLMTCVICAYKTYKKLNDLTIQMSERTRHMNKQLFWTLGLQTILPCVTQYIPVGAMFFLPFFEIHFGRIGNVVGAACSLYPAIDPIIAIFMIDKFRNYVLGKEARTAPKTSTMNEDGKSTVAE

SEQ ID NO: 17 - protein, 349 aa, Caenorhabditis elegans
MSGSYLFWIHVTHFIPKLGFVATFMFGMCLLSLNYLGAQKNFGSYKYLITAFTMLGMTFATVEIIVYPNVHNYKASFLFYSFEESFGLRGSWSRNIPLAIYTFFHSATMSLLSVQFIYRYWAVFDTNKLAYFEGCNSLFWFFYCAFFGFQYALGTYFFLARDEITDDYLREDMLLRYNANITEIPAMAIVAYDPVDGSVRWRNVIGILNICSIVNFQYGVMIYCGWSMHTKMEDKIKNFSETLRKLHKQFFKTLVLQITAPTIILFIPITIIIFLPLFNLDVSLPSGVMLCSFALYPPTDSFIVMFVVSEYRSTAKRTLATFSNGIKKFKQSRVGGIPSGTISSRYIAS

SEQ ID NO: 18 - protein, 338 aa, Caenorhabditis elegans
MAVSPYLRICQFLCFFIAIMANTVLLYLIKIRAGASFGRYRIMMITFSIYAIIYATIEILTLPVMHLHGSGILFYVNSVLKDHISAGVIISTMYCGSFAFCISMLATHFIFRYIAVCKNNKLHYFEGINVYLWLIPPFFFFTIWGSSIYINFGPNQMKKDYFRNVTLELYDEDIDKIAFIAPLYFTRGEDGSRQFNFPDLFGAFLSCNIMSICFGTCIVCAYKTYKKLNDFSIQMSKRTRALNKQLFLTLGLQTLLPCFTQYIPVGLIFILPLFEVEVGKAGNLVGVTCCLYPAMDPLIAIFMIDRFRNFIFRKESPSTTKSSKISAINSEGFSSTGK

SEQ ID NO: 19 - protein, 335 aa, Caenorhabditis elegans
MMLYRVIHYIQFAAFAVSQCTNGLLLYLIWTKARKVLGAYSYLMLAFSLYAILYNYVDIITLPLVVIEKQMYVVVNHGPIRNVPIFGFLFTCLFGSSFGLCISLLSTQFFYRYLAVCRPKSLHYLEGRRLALIFIPAIFVSVIWFFFCFFGLDITVEKQEMLKEPFMEFYNEDSNTMSFVSGLFWSLDENGTKHWNMKDCIGSLGLAALMIVCCLTIVFCGVKTYKKMNDSGNSLSNRTKELNRQLFVTLSLQTLLPFMLMYGPVGLLFIFPLFQIKFDILSSSAAASTAIYPAVEPLIAIFCIKTFRKALCFNQCIRQTARITSTAASTAAKSN

SEQ ID NO: 20 - protein, 328 aa, Caenorhabditis elegans
MYQVVHFVQYFGFFFSQFTNFILLYLLRAKAGKHLGPFRYLMITFSLYSVVYNYVDIITHPLVLIEKQVFVVINHGPFRYTPGFGYVLVCIFGASFGLCISLLCTQYMFRYIVICHQKYLHLIEGKRLALLFLFPTTISITWFTFCYFGLTITSEKREALRIPFQENYGEDSDVLMFAAGQYWIFGANGEKIWCLRDYFATLGLVGLMGICCFVIIFCGLKTFRKMIEVQGSMSKQTAALNKQLFLTLTLQTLLPFILMYGPVGLIFFAPLFEWNLQLFVSSAGATTAIYPAFEPLIVIFCISLFRNAVFPCTRSKVTTSSGAFSSAL

SEQ ID NO: 21 - protein, 362 aa, Caenorhabditis elegans
MVLYSSKTEPFLSTSSDMVCATEFVRYLHLIHYIGFVGAQSLNAVLVFLIITKSENLLGNYRYAMFVFTLCSMVYSMVEILVQPVGHMKGSMFVVFMHSSILNATNPLAEFLTCLHCVLSGFVASLLACQFIFRYLAVCRTHFLVHLQGINLCLLFIPSIFVFAVWHFGFFHGMPNTLEKQIFLREELQTCFNVNTTVNPFVGPMYWTKGADGQIHWNIFELISALSCFAVLIICFFTIVFCAYSIFMKMSNSIHHLSAKTLDLNKQLFRMLCIQTVIPMITMYFPVALFVTLPMFGKDIPYLGNMTSSSLAIYPIIEPIIAMTCVASFRKAIKGSIRCSVSRSTQFAIHPASSPRLTDQKQ

SEQ ID NO: 22 - protein, 346 aa, Caenorhabditis elegans
MSNFAVHLVQYVGFFLAQFTNALLLCIIANKAKKLFGGYRYVMIVFVIYSLIYSWIEIAATPLMYGHRSMIIIMVGSSLRYEDLAGTFIICLFCAAYSLMTALLATQFFYRYIVVCRPQFLHHIKGYKLCFIFLPGVVIFFLWYLNVHFGMKKTLEKAKFSQEVILKNCEEDTFQIVFVALQYWEDDLNGKSHFRIIDFLSYLGFLLMIALCFLTIIFCALKIYFKLKEDIHSMSERTKELNRQLMMTLTFQTIFPFFTMYSTVGAILTLPIFEIELGKLASVTGMLSGIYPAIEPVFAIFFVKEFRNFVLCKKHFVANVIPLQHLPVPRNSLMTAHASLQNLSIP

SEQ ID NO: 23 - protein, 343 aa, Caenorhabditis elegans
MINWFEINKIVSQFGFFITTSSQLTVIFLTLLFVRKDLGAYKHLVVLFSTVGVLFAILEFLLYPGLHLHNAGYIVYINNRPFDASKPLLTLILAVYCSLYCTAISLLAVQFVYRYIAVFYPIHLKYFDKWYLLIWVCYAVWFEFQWGGGIFKFDEVDDYSEEYTRQTMMDYYQIDVSEVPCLVNVVYQTIPNSTDTFIRWNNAFNTLNMTFVGTLQYSIMIFCGYKLYYKMEEKLSICSDDSRKLHRQIVKTLLLQIITPTIVMYSPVFLVIYLPLLNLDFSLPMGIFLGIFSLYPALDAFILMYVVTDYRRALKDVLKVLNPFKKVTVSTLVVIPGQAQFIP

SEQ ID NO: 24 - protein, 334 aa, Caenorhabditis elegans
MIGLHIFHYAGFFGAQIFNTVLAILIVKRAGKLFGSYRHVMFVFTFCSMLYSAVEIIAQPVLYMKGPMFVVFLDNNVFSQGIGNVVACLHCGTFGFLISVFAAQFFYRYIALCRQSLLSYFDGYKIFLIFIPCVITYILWFELVVWGMSATMEKRIYLKDDFKNMYESDSMMISFIAPLYWNNGPNREKVWRFKDAASALVCTGIIGSLTTLICFFALRIYLKMQKEKGHMSKRTLELNRQLYIMLSIQTIVPFITMYIPVGLFIVLPFFDMGLGAYVNYPSASMSLYPAIEPLIAIYCIKDFRKTIANFFRRVRVGPNGISVYSTSGTQMAIK

SEQ ID NO: 25 - protein, 334 aa, Caenorhabditis elegans
MELTLKLCLHIAQYAGFIVGQLTNSCLLFLIFTRAERLFGSYRHVMAVFALFSLVYTWIEFIAQPVMHIKQSMFIVMLDSPFTFDVSTGNEITCLYCSSFALCISLLAAQFYYRYIALCQPETLEKIKGWNLTLLFIPCIVCFVGCVTCVYFGMHNTVEKQKFMRDVMFENYDVDLGRESFIAAFYWSYDKNGSRIFRFRDTIAASGCILVACFSTILYCAFKIYIRLKSAQALMSTKTRELNRQLFITLTFQTLFPFFMMYCPVGSLISFPFLEIEVGKFGNYTGAAAGIYPALEPLIAIFCIKDFRREVLCQRKKVRTEVKSRSGIPSTSFI

SEQ ID NO: 26 - protein, 336 aa, Caenorhabditis elegans
MGLTLKLCLHIAQYAGFIVGQLTNSCLLFLILTRAERLFGSYRHVMAVFAFYSLVYTWIEFIAQPVMHIKQSMFIVMLDGPYTFEIAVGNEITCLYCSAFALCISLLAAQFYYRYIAVCKSEDLQKIRGWKLGLIFIPCIVCFVLWFACVYFGMHNTIEKQQFMRDVMFENYEVDISRESFIAPLYWSYNKDGERVLRFRDIIGSSGCTFILVTCFSTILYCAFKIYFRLKSAQALMSAKTRELNRQLFITLTFQTLLPFFMMYCPVGTFITLPFFEIEVGQLGNYVGAAAGTYPAIEPVIAIFCIKDFRKTVLCQRRKNRTGAKSSSGIPTTSFH

SEQ ID NO: 27 - protein, 334 aa, Caenorhabditis elegans
MLYLHIIQYVGFIGAQISNSVLIYLIVTRAKKLFGTYRNVMFSFAVYFSVYAWIEILAQPIIHIKSPACVVFMESPLKYYPVLGYNITCLYCGSFALVISLLAAQFCYRYFAVCRNTQLANYESRIVAGIFVPCLICFIAWYAFVYFGMHNSIEKQLYLKDELKTVYNEDSTKVAFIAVMYWTVGENGEKLWRFWDLMLLVACILTIGGCFAIIVFCAAKIFLKMKSAGNNMSKRSLELNRQLLVALTFQTVLPLFMMYIPVSLEITMPLLEIETGHLANFTAGSLAVYPSLEPLIAIFCIREFKKAVFCCIQPKKTSTVQFSAYYTSKDKTKI

SEQ ID NO: 28 - protein, 330 aa, Caenorhabditis elegans
MLWLHIIQYSGFFMAQVTNALLVYLIWTKAEKLFGTYRHVMCTFALYSLVYAWIEVLTQPVMHIKGPIFIVIMDSPLKYQKWIGNDLTCLYCGSFALVISLLAAQFFYRYVAMCRSNFLQNIEGIKLTFIFIPCLVCFVLWFEFVYWGMSNTVEKQLYMREEIEAYYNEDSTKVSFIAPMYWSVGTNGEKIWKFWEIMSSVECVCIIAVCFSTILFCASNIYFTMKSASGHMSRKTLELNRQLFITLTFQTILPFVMMYSPVGLLIVLPLFEVYVGSIANFVGASLAVYPSLEPLIAMFCIKEFRKTVTCPSLRKVTPATVSYTTSSRAV

SEQ ID NO: 29 - protein, 334 aa, Caenorhabditis elegans
MPLWLHVIQHAGFFFAQITNGILVYLIATKAQKLFGTYRHLMCAFAVFSLIYAWVEVFTQPVMHIKGPVFIVFMDSPLKYQAGIGNFVTCLYCGSFALVISLLAAQFSYRFIVVCRPEFLPKLDGFKLVIIFIPCMFFFILWFELVYWGMANTKEKQEYMREELETFYEEDSRKVCFIAPMYWSIGKNGEKIWNFFEIGLAFGCVMIIVVCFTTILFCSINIYYFMTSIQCHMSKRTLELNHQLFVTLSFQTLLPFVMMYSPVGLLFCLPLFEVYGGDIANYVGATLALYPALEPLIAIFTINEFRRTFMNLHRKKVQTTVTVPTLTPTMGVVD

SEQ ID NO: 30 - protein, 340 aa, Caenorhabditis elegans
MAAFAIIKSFVQFVTVSFSLVINSILIYLVITKSSKKLGNYRHLMCYFSLFSMVYAVLDWIVQPFIHSHGASFSMIMDLRESALNKKVAFFFVASLAGCFGVSIYAIAINFIFRYFALQREGRLRYFAGKRLILWFCIPLFGGLSWVFLCWCSMAPDPEFTNYLRDSIRANYDLDADFITYTGSYFYRFERDGSVKWSIENSLGALGLNVLMIIPFFIILIFGYRSYKKISKLMAQGECDYTKRLQMQLYKALVAQTIIPMVLLSFPIGILFSAPLLHLDIENGSIIVTFFYSLYPAIDPIPIILFIDDFRNAFFGVFQRRPSKNQVASVVSVDATVDVS

SEQ ID NO: 31 - protein, 340 aa, Caenorhabditis elegans
MGTFSLIKSITQPIAVVLSVLVNSVLILLVVTNSPRKMGSYKYLLIYFSALTIVYAANDFVSAPYMFNDDSTVVVLVDLKNNLLKDRPDLLLLAVVSGVSCFGISLYAIAINFMYRYFAVQREGRLRYFSGCRLVFWISLSIIGGIMTGLTFYAIGSRQEISHGLRENLETMYDLDMHRTQYWVFLYWQPKDGNQDLTAKDIMANLGLTTSMVIPILLIVFFGTKTYRKVKNLTTHGKSEYSKRLQMQLYKALVAQIIIPSVFLFLPTLLIAAGPLFKLNIPWASLPLSILFSMFSVMDSIPIIFLVDEYRNALFEFFGGFCCVNEVVPASARDTSSTQL

SEQ ID NO: 32 - protein, 336 aa, Caenorhabditis elegans
MGIFVIIKLIVKDSCTLIAILTNSLLIYLALTKSPPKMGNYKYLLCYFSVLSITYVTLDFLAAPYVYTFEASSVLLMDLRNTIFTEYPAVAFLIIVSACGCFGATLAAIAINFIYRLWALERKGRLRYFEGKLLIAWILLSLFTGFLSACVFWTTGPNDQINNYIRHNLKEEYDLDVDQTSYIAFVYWKSENRVDYLNILDTSKLMIVNIIMIIPFSIIFYCGLKSYYQIKELISKGENEFSRRLQMQLYKALVAQTFIPTLFLFIPVSLFLVGPLIGINVTWALRAVTVFFSIYLATESLPIIFLVDDYRTAIANIFRRCLSKPQVATVSVHDSD

SEQ ID NO: 33 - protein, 338 aa, Caenorhabditis elegans
MNTAIKNDVQNVAFSMAFITNCTLILLIFSRSPFKLGTYKYLMVYFASVSLFYSFLECLLNPLLLSYKDCFQVIVKLQFSNPKVDRYILYYGCGICGVLMPMFVVHFIFRYFAMQRKGNLKYFEGWYFLYWLSVPLISGFLWAQTLFAFLYEDTESSDYMREILLENYGLNISDITYVGVLYYKKSISGSGTEPNFTGLQGVCVLGTIMTVCFCFIIYFGTLTYKRIMHLILEGRSEYTRRLQKQLYQALVIQTIIPIFFLILPLTIYFYSPLFHFGNQTIGDWTALSTAIYPIIDPLPVIFVIDNYRLAVLEFFGCIKPQRTVSINVTSSSNAAVEN

SEQ ID NO: 34 - protein, 347 aa, Caenorhabditis elegans
MKKETTFDAMKATVQRISFAFSCFSNIILILLICTNSPKKIGSYKYLMIYFCVFAIFFSVLDIVIQPYILSAGPGFIVITEIKDTFLGPFGETCFLSSICGCFGVILATIAIHFIYRYFALERKGKLKYFQGGYLVVWLFVPLFVGTVWTIVTVYFCAPNDITLEYSRTLMKDHYEIDLENVTYIGSIYFVKDANGKSVMNKFALLGMAILFSIMGVSLSILAYFATKCYTRIKKLIYEGESSYTRNLQKQLYKALVAQASIPMFFIFTPIGLYLTLPLVGIELEISGEIATFVYALYPALDPLPIIFIIHNYRDAVLEFLGCCNVNNRIGAEDEPTSVTRHVSNCS

SEQ ID NO: 35 - protein, 342 aa, Caenorhabditis elegans
MATYEELKNVVQWTSFVFSICLNSLLIYLILTKSPKKMGNYRYLMIYFSCFAMFFSTCDVIVGPFIHSFQKSFCVLADRTNWLLGETTQFALICVLCGCFGVTITFFVIHFVFRYFASERQGRLAYFHGWYFVVWLTIPVFFGIIWGGTVAYFLSPTQETTDYVRESIMSNYNLSMENVTYVGALYWSQRGNGKEEIVMSTLIATIVFTAMITSSFSVVCYYGYLSYKRITSLIDEGQSEFTRNLQIQLYKALVVQAIIPIVLMYLPVGSYLVLPAFGINISPFSKLVTFLYAAYPAVDPLPLFLIIDHYRLALTDYFYCFSSNKNRVNASEAEISRNQATI

SEQ ID NO: 36 - protein, 335 aa, Caenorhabditis elegans
MTNYEILKSAVQWISFVFSICFNSILIFLIITQSPKKMGNYRYLMIYFSCFAMFFSTIDVIVAPFIHTHGTSATVLMRRSDSDTIVNLQYVLLILLCSCFGVTITFFAIHFVFRYFALERKGRISYFDGPRLIVWIAVPMFFGIIWGTTVLFFALPTDETTELIRESVMKHYNLEMEDVIYVGASYYRRKSDGTLEMIVSSFIAASIFFTMMGTSFSVVCYYGVLSYRRIANLQNEGESEFTKNLQKQLLKALFLQALIPILLMYLPVGTYMTLPALNLDSEEFSKFVTLLYAIYPAIDPLPLFFVIDNYRIALKGYFLGCPGNQNRVSVAGSDN

SEQ ID NO: 37 - protein, 342 aa, Caenorhabditis elegans
MRISNNLNLLLQCSSLICAIVFNSLLIYLIITKSPKKMGNYKALMIYFSTFSMVFAVIDMIVQPFIHSYGSCFFMIMSIKDWPFTVEMAQIALSILCGCGGVTPFLIAIHFIYRFFALERKGNLKYFSGTYLFMWFLIPIAGGINWFHLSWFYYRRNDKTTEYIKEAVLENFGLHMNETVYSAALFYPADEHGVPNLDIKIFISYVILSFSMVIPFAVMLVAGVKSHSQIKKLIEQGECDYTKRLQLQLYKALLVQTFLPIFLFFMPMGALFSAPLFHIDIGSWSYLTTYLYALYPAVDPLPIMFIVQEYRNAFIELFDCFRCSPPSRIEDSSTIKRDSETV

SEQ ID NO: 38 - protein, 340 aa, Caenorhabditis elegans
MLFSTLKFAIQLFSFICSLFFNIILIYLILTKSPKKMGTYKYLLVYFCCFSMLYSILDIIVGPVIHSHGSSFFMMMKLGILKNHPEVGFLLVSLLCGCFAVSITTISIQFVFRYFAMERKGRISYFRGKYLIIWFLVPLISGTIWILQDWVFLHPNAKMGEYINETVFINYGVNVTDITYCGTFFYPKNDQGVPSLDYFQFFGFLGFCVIMGTTFLIVVIFGIKSYKLVRELPKHGESEYTYKLQSQLFKALVVQAFIPITFLFIPIGLVFIAPLLHFDIEPASFLVTIFFSIYPAVDPLPILLIVAEYREGLSELIYKTIGKRSIQISSYTDPQITSIS

SEQ ID NO: 39 - protein, 341 aa, Caenorhabditis elegans
MLFAAIKFTIQLVSFIVSIIFNFTLIYLILTRSPKKMGTYKYLLIYFCCFSILYSILDIIVEPFIQSHGSCFFMMMNLGSWKSYPEVGFLFVTILCGCFAVSITTISIQFVFRYFALERKGRITYFRGHYLIVWFIVPLVSASIWITQLWVFQHPNSVTSAYLSETVFVNYGMNISDITYTGSLFYPPDEHGVPHLDLMQLFSYLGFCVTMGTTFSTVVVFGMKSYKLVCELPQLGESEYTYKLQSQLFRALVVQAFIPITFLFLPIGILFTAPLLHFDIEPASFLVTIFYSIYPAVDPLPIIFIVVDYRDGLVELVGHFLCKKNNQVNTSYTDQQVASIS

SEQ ID NO: 40 - protein, 346 aa, Caenorhabditis elegans
MEIKEFESLKTLIQLISYCFALTSNTLLIFLIVTKSPKKMGTYRSLMCYFCIISLIFTTLDVIVKPNIYSRESAFFMMMDLRNRMLPRYIEECLMSVLCGCCGMAIYGIAIHFVYRYFALERQGRLRFFKGAYQIFWFFIPIFGCLNWTFIAGYFFAMNPISTGYIAPMIEEMYNISINDAAYSAAVFWPPNEQGVVEFHWRSGLGLINLVTSMSLSLSVVIYTGVKSLKKIKQLLGRLESKFSKNLQMQLYKALVAQTLIPVLFIFIPFGILFTCPLFLIDCEFLSAPITVIYAVYPALDPLPCLFFVDNYRNFIAGLFSKNKKKIAKVSVVTDDCISKNIYSQR

SEQ ID NO: 41 - protein, 342 aa, Caenorhabditis elegans
MSPTTFKTLKTSTQIASVILSVFINSLLITLIITKSAKKMGNYRHLMIYFCCCSIMFSLMDIFIRPVIHTYESAFFMVMDLRGRDMSLDLAGGMICAMAGCFGVIIYGIAIHFIYRYFALERNGRVKYFDTKFLPLWFMIPILGGVSWTLVSWFCFPMNPVTSGYIGPDLYESFKLDINQSAYAAALFYPPDVNGKKLFNLKAGLGLILYLLIMAIPFFVVIYVGIKSVSKIKQLPSSNYGKGLQMQLHNALVAQTIIPVVFLFVPFGVLFICPIFEINCQFLATILTFVYAIYPVLDPLPIFFFVQNYRNALSEWFSCFRCRKKSRVHIAPEEVSRDADSC

SEQ ID NO: 42 - protein, 345 aa, Caenorhabditis elegans
MHATTFESIKFVFQVTSVIFSWLINSFLIYLILTKSTSKMGNYRHLMIYFCCFSILFSTLDIIVQPNIHTYKSAFFMIMDYKNRGIPLWMAEVLICLMCGCFGMTIYGIAVHFIYRLFALERKGRLQFFQEKYLFFWLLIPFIGGAAWFSACFTVFSMDPMKTDYVRQTTKEFFDLNIDNCVYAGAAFYPLDKNGTTVISTRSFIGFSLFLVVMLIPFAIVIYAGIKSYFIIRALLKQGETRYAKNLQMQLYKALVAQTLISIFFLFIPFGTIFVLPIFEINCQFLTAPITFIYALYPAIDPLPILFFVDYYRIVVSNLFNRIRCKNSRVGIYEEEPASSNNGRT

SEQ ID NO: 43 - protein, 339 aa, Caenorhabditis elegans
MTPVTFANIKTVIQFISVFISIFINALSIYLIVTKSPKIMGTYRHLMIYFCGCSMVFSVLDVIVQPSIETYKSAFLMVVDVKNRSLNSWSAVLFMNLLCGCIGVTVYGIAIHFIYRLLALERKGRLRYFNCQYLPIWFSIPILAGTIWYIVTENIFGMNPVNTEYIRNPVKDSFNMKMEDCVYGAAVFYPIDKNGIKTISWISFFGLGCYLTLLTIPFISILVAGAKSWNHVQKLLEHGESEFARNLQMQLYKALIAQTLIPVVFFFTPFGCVFVLPAFEIECQFMSAPITLVFAIYPAIDPLPNLFFVDYYRNPISNFLRKVWCRKPKVEAATINSTL

SEQ ID NO: 44 - protein, 341 aa, Caenorhabditis elegans
MKAKVDFEMLKLVIQVVSVFLSITINSILICLIITKSPKIMGTYRHLMIYFCCCSIFFSIVDVIVQPNIQTYQSSFFMVIDAKSRSMEHWVVGVLMHLLCACFGVAIYGIAIHFVYRYFALERQGRVKYFNKKYLVFWFTIPLLGGAAWYAVTECCLTPDQLGIEYIRATVKESFSIEMENAEYTGCVFYPLDTDGKQFINWRSFMGYTGYLSIMAVAFLIISFAGCKSCYLVSNLLDQGESEFSKNLQMQLYKALVAQTVIPVVLLFIPFGLLFTLPIFEINCQFLATIITLIFAIYPAVDPLPILYFVEYYRIPILEVFKKPHCSGSQVYPASNNSVEN

SEQ ID NO: 45 - protein, 345 aa, Caenorhabditis elegans
MKAKVDFEMLKLVIQVVSVFLSITINSILICLIITKSPKIMGTYRHLMIYFCCCSIFFSIVDVIVQPNIQTYQSSFFMVIDAKSRSMEHWVVGVLMHLLCACFGVAIYGIAIHFVYRYFALERQGRVKYFNKKYLVFWFTIPLLGGAAWYAVTECCLTPDQLGIEYIRATVKESFSIEMENAEYTGCVFYPLDTDGKQFINWRSFMGYTGYLSIMAVAFLIISFAGCKSCYLVSNLLDQGESEFSKNLQMQLYKALVAQLYFQTVIPVVLLFIPFGLLFTLPIFEINCQFLATIITLIFAIYPAVDPLPILYFVEYYRIPILEVFKKPHCSGSQVYPASNNSVEN

SEQ ID NO: 46 - protein, 347 aa, Caenorhabditis elegans
MDLTVFNSFLKTAQFVGTCIANPLNIFLIYLILTKSSKKIGNYKYLMIYVSIYEILFSCSAIVTEPLLHSFTTRVIVIVDVHNSIFSREICSILDCLMCAMYGVSMNVFALHFLYRYATLFPKSKKLFDGARIIFWLTVPQIYGVVWLVTYYAVFRESPEYTEFIRKTLMENLDINVDDVVYVGPYYYMEDKNGIHDMDWTAFWAMAIVWLLIMSSAVTVFICGYGCYKKITKGLEVSSNSKQTKSIQKQLFYALVVQSAIPFLLMYIPSTVVLFCTLIQLDVGSASLFISYSIAIYPVVDPLPTLFIVQNYRNAVKKMITRTWNIVTRKKDMNSSAQIPSSNKTTA

SEQ ID NO: 47 - protein, 351 aa, Caenorhabditis elegans
MLKSPFSLFCKSLQETCTFISLILNAYLILLIIYKSPKKIGNYKYLMIYICVFEILYTILGLITKPYVHSYTSRVIVIVDVKNSVFSRSVNKFLNSLICGFYGCSVSIFAIHFMYRYGALDRNYEKHFKGWKMVLLCLIPIFYGIIWGLTMHFIFEEDKAFTEFMRKDIWDLFELPVEDIVYTGSYYYPEDKFGVREMNWRAVGGMAVLWFVIGSSTITVIYFGLNCYFKIREIMNSTAGNFSKSIQRQLFRALVIQAAIPLLLLYIPCSIVFICPLIQVDLGNMSAFISVSVAVYPAIDPLPTLLIIKNYRRATIEIFTKTVRLLREAPSSTIALVHRSSNGTGEHRIGT

SEQ ID NO: 48 - protein, 304 aa, Caenorhabditis elegans
MTIIMNCFMIYLIIKKSPKEIGRYRYLMLYISFFEIIYCIAGKVVRPFVHSYGSRAIIIVEAKDAWVNRTIMKVINSVVSGCYGCSSSILAIHFMYRYGSLHVNHRNMFEGWKFVAWCFIPASYGAIWSLTIFFIFPDDDGFTELIRSDILETFDWKMEDIVYTGFYYFREDKNGLHGFEPLPIVGMCILWSMMTSSSFVVYFFGYRCYKLVSTMTKNSFSSLAQGLQHQLFKALVWQTVIPIFMVYIPSSLILICPLFNINLGRISVVITVTMSIFTALDPLPNIFIIKNYKRATYQLLCSPV

SEQ ID NO: 49 - protein, 323 aa, Caenorhabditis elegans
MFDSGLPIFWGWFQDVFAVMTIIMNCFMIYLIIKKSPKEIGRYRYLMLYISFFEIIYCIAGKVVRPFVHSYGSRAIIIVEAKDAWVNRTIMKVINSVVSGCYGCSSSILAIHFMYRYGSLHVNHRNMFEGWKFVAWCFIPASYGAIWSLTIFFIFPDDDGFTELIRSDILETFDWKMEDIVYTGFYYFREDKNGLHGFEPLPIVGMCILWSMMTSSSFVVYFFGYRCYKLVSTMTKNSFSSLAQGLQHQLFKALVWQTVIPIFMVYIPSSLILICPLFNINLGRISVVITVTMSIFTALDPLPNIFIIKNYKRATYQLLCSPV

SEQ ID NO: 50 - protein, 346 aa, Caenorhabditis elegans
MLQSGWSLFCGHLQNVCVCLTIILNCYMIYLIINKSPKKIGNYKYLMLYISFFEITYAILATVTKPFVHSYTSRVIVIVDAKSSWFNRDVTKILNSCICGFYGCSVTILAIHFIYRYGSLHKTRRTLFEGWKFIAWCLVPIFYGIVWGLTIFFIFPEDKGFTELIRKDIWDYFELSIEDIVYTGPYYYPEDKNGIHGIEPLAVFGMLVLWFVIVSSSLAVMFYGFRCYRTMSELLSRSTSTFAQGLQQQLFKALVWQTIIPLIMLYVPCSIVFMCPLLQINIGNCSAFITVSVAVYPAVDTLPNIFIIKNFKETTLDLLCCGHQKSKSSSSSKTYSSKGGINITTT

SEQ ID NO: 51 - protein, 354 aa, Caenorhabditis elegans
MLELLKDIVQCFALLISIFLNTILTYLILTKSNSKMGSYKYIMMYLSLSALCYSVLGMIVRPDLLSYSSCFVVYIKNSTSFFSPTVMIYLMSLICGFYFFFASLISVHFVYRYKALKYGSKWIYFHGKYTFAWFLISPILYINWTLNCIFAFQPNQRSTEFLRPRMERDFGINVDDVTYIIADFYPMHENGQKFPSIGAFISGFNFLLMTTVSLFVIFIFGFKCYYEMTRVVVPGRNYSITQKLLQTQLFRALVFQTLIPLIIMYIPLFILFLFPMLNIDLGFAHYVSISISLYPALDALPSILLIRDYRDSLIKMFKKQENVPMFAPYYVRRGSTTISSARKSHVQLNRVELS

SEQ ID NO: 52 - protein, 346 aa, Caenorhabditis elegans
MSIAWLSVQTRIQQFSLFISVILNSILVYLILKFSPKKIGSYKYLMIYISLFQIFYSIMDSISLPTYHAYSSVLLVFKNIRDQPYIPISVHYWLLVVYSGCYGFCMGIFGIHFFYRYLAIYGHTEMIRKLVCILFLVPPLFGIIWSFIVAICFGPTSEVSAEVENSILESYDLKIDDIVYIAAFVWPRNETTGVKYLNKRSAIGIGFDQLVVIISLTVIAYCGTCCYYKIQQQMRVAISLSKITKNLHRQLFYALAIQTAIPMLLLHLPVSILFMFPIMDSNLGIFTGFVTITIAAYPAIDPLPTMLVIESYRSAVYNFINKIFCRKKNDVRSENEISMTTIHVTV

SEQ ID NO: 53 - protein, 356 aa, Caenorhabditis elegans
MHLSEFWNIFLKIVQYTSAFMSVSLNCILIFLILAHSPKKLGMYKYLMIYISSFEALYSLWDVTTEPMVHSYKAAFVVFRNFKNSDFDREHSFILIVIYCGCFGFSLAIFGVHFVYRYGAVVKEFRDKWLGGKKIYILFFMPIFYGTWWSVLCYLYFHFDDSTDDYMRKTIFDGYDTKIEDTSYIIVLFHPVDKNGTSHPDPAVFASIACMWFMILSSVFSVFFFGIKCYFRITEALSRTCNVSSVTKGLQQQLFQALVVQTFIPLILMYIPIAILFTFPMIAVDIGFASSFVAMTIAVYPAIDPLPNMFIIKNYRKAVFAFFSAIFRNPCGSIRRAQCTQIELVSKSETPKNIGL

SEQ ID NO: 54 - protein, 339 aa, Caenorhabditis elegans
MVDWFLVDQTIAQLGFYLTTTSQLVLIFLTIFYVRKDLGAYKRLIVLFAAMGIAFASIEFVMYPVLHSFNAGYVFYTTNRPLNVSNETLTVLLAVYTALYSITISLLAVQFVYRYIAVFHSEGLRFFKGWYFLLTIVYSYWFGFEWALGLYKLDEADEYAIEYMRQELMDVYQVNISQVPCVINLIYQNLPNSTDTFIRWRCVMCTLNMTFIMIVQYGVMIFCGSHLYFEMEEKLKMVSDQERKLHKQIFKTLMLQITTPTIVLFSPIIYIISVPFFNIEVSVPTGVFLSVFTLYPALDAFIIMYVITDYRKAILKILRRSGSGSVTHPTRYTTSRTDT

SEQ ID NO: 55 - protein, 342 aa, Caenorhabditis elegans
MSLQLICTIIACFLNSILLVLIWTKSPVQTGKYRWLMTFTACFEIFWGLFDLPAEIIAHSAGCSFIVFRINYEDSVIGSQYSIILLMIYAGIFGASMAVFASHFIYRYGCIEKTFGTKCTSNWRFGFLFIVPLLYGVWWGTLVNIWWRANPDMDEYASIIVDCTVGLPIENVTYFGAKFYNFDKNETMSINLPAWIGVCQTSFMVSSSLMCVFIFGVLCYKRLSNTLSIVSDAANNLQKQLFYSLVLQTLIPLVLMHFPITIFFIGPMLTLDTDFTTYVVLNTIIMYPAIDPLPNFIIIKSYRESVKACVRTVLFLGPSNSQVVHNAYSMPSVNSIVNRVVT

SEQ ID NO: 56 - protein, 347 aa, Caenorhabditis elegans
MLTEEWLQFEGETQDVCGFISIFTNLFLIYLILKRSPDALGLYKWLMMYTSIFELTYSFVNLFAGCSVRTFGSAFIVFRKDQHFHLISQFMAVNYCSFFGFSLAIIACHFIYRYGTVELEFHKKYISGSKHLLLYIGPISIGIIWGIVCSVYCGETPERSDYLRKNMMDNYRLRIEDVGYISANYWPMGKNGTVRPDFDSFFGTFLMWIIVGASIGSVLYFGIGCYRWISHQLKIVETQSNTVKSLQKQLFYALVVQSAIPSVLMYFPISMAFIFPMLNIELNLKYPFIGLTIAVYPAIDPLPSLLIIRSYREGCNDIFRKLMFWKNNYQVAVVRCQTLLNSFAITV

SEQ ID NO: 57 - protein, 328 aa, Caenorhabditis elegans
MQFELTFQRICAFVSVITNSLLMFLILGKSPPQLGTYKWLMLYTSLYELVYTSMNIFVEPSTGTFQSSCYMFQDMKKSMFGADGTLFFILIYCSCYGFSMSIFACHFIYRYGNVNTIFKQKYISGKKHLFLYIAPLLSGFVWGLVTWLTMHESSSKTSFLKIHFEQVLKLNIEECAYVAFWFWPVDEHGEFQPDLISFLGFGIMILILSWSFISVVYFGFNCYKYISKQMGSLSSQSQALKSLQAQLFYSLIFQTAIPCVLMYLPAGIILSVPMFNVGFNLEVPLLSITIAIYPAIDPLPTIFIIKSYRRGLIDMFRCHKKTLIVASS

SEQ ID NO: 58 - protein, 358 aa, Caenorhabditis elegans
MPTVQWIQLEETSKITGGSISVITNGLLMYLILTKSPSKLGSYKWLMLYTSFFEFFYAFVNLFAGPFVHTYGSAFIVFQDMNTFYFSHHVAQFLVCLYCSCFGFSMAIFGGHFIYRYGAIDSQFYQKYLSGFKQSLLYILPFCYGILWGVICWIYYGETPDRTNYLRETLLSNYRLKIEECAYISARFWVSDKNNYLFPDFDSFFGIGVMWIILGSSMISVIYFGTRCYRWLTKKLEMIENISDSIKSLQRQLFNALLIQSAIPLFLMYMPAAMVFVFPMLNTELNLKYPFIGITIAIYPAIDPFPTIIIIKSYRRGFYELLRCLTGRQKNKVAVNPNVPSHAYTLPMSASNSIYVTN

SEQ ID NO: 59 - protein, 351 aa, Caenorhabditis elegans
MNISNQTFPYENYIVVSKRISHLGFCSTSFFCTILIIIIVKFSNKNVGSYKYLMIIFSVLGTLFSIVEGILCPNEHSYTASWLLFITERPFGLSPDSLTLFLVLYAVLYAATICMLSVQFVYRYCAIFHQFGLKYFEGWRMLSIAVYCSGCGILWGGSMYLFSQVDDYAKAYLRGEMSIKYGINIDNLVAFTLVAYDKDGHFRWWNSIANFILCIIMFAQYAIMMFCAVVMYRKMEENMKMMSESLRRVHRQFFRTLVIQIIAPSIFLFSPLTFILYHPFLNYAISFPSGMFLCAISLFPAIDAIVILTIVREYRNAVKKIFRYACCRRKQNEVKTSITYASTTLTTSTAQ

SEQ ID NO: 60 - protein, 353 aa, Caenorhabditis elegans
MNISNQTFPYENYIVVSKRISHLGFCSTSFFCTILIIIIVKFSNKNVGSYKYLMIIFSVLGTLFSIVEGILCPNEHSYTASWLLFITERPFGLSPDSLTLFLVLYAVLYAATICMLSVQFVYRYCAIFHQFGLKYFEGWRMLSIAVYCSGCGILWGGSMYLFSQVDDYAKAYLRGEMSIKYGINIDNLVAFTLVAYDKDGHFSFRWWNSIANFILCIIMFAQYAIMMFCAVVMYRKMEENMKMMSESLRRVHRQFFRTLVIQIIAPSIFLFSPLTFILYHPFLNYAISFPSGMFLCAISLFPAIDAIVILTIVREYRNAVKKIFRYACCRRKQNEVKTSITYASTTLTTSTAQ

SEQ ID NO: 61 - protein, 363 aa, Caenorhabditis elegans
MPVSWDEIQNSVQFYAAITAVPLNVLLIYLIIKYSSSEIGAYKYLMIYISVFELIYAIIDVIVSPFAHAYGSTFLVIVNLKKTSIPRWVHRILLSAYCGFYGCSMAIFGIHFVYRYLVAKGSDLLKTFQSKKIIGWLLIPAIFGLIWSCLTYWPCAKRESTDIYVKDNLYEKFNLSIDDVEYIAPYFYELDKNGNLEIYWPSFVGIGVNSVIINVSIATIIYFGKKCYTILNSLVPHTSKSEKNRRLQKQLYFALVTQTLIPIVLMHIPVSTLYFSAFFCIDLGSISGIAPLAIALYPTLDPLPTMFIIGHYRTVVFNWILWLPRKFGICSKNSVNPEIDETTVQDGPDAVTQSNAIIQESQV

SEQ ID NO: 62 - protein, 345 aa, Caenorhabditis elegans
MPLISDKIQIPVQKGSAIIALILNTCLVLLIIRKSPKELGAYKFLMIYISILEVLYAIVDILVLPIFHNTGFTFIILTRLETAFFGPQVQLILSGIYCGLYGSCMAMFGIHFIYRCFVMKGNAKLKSFHSWRILFWFAIPIIYGLVWGSIAVVFCGPRDITDKVIEFDLLDSLDINFKNTVYVAPYLFDEHHEIYWPVVISLLVDCIIINSSFFTVCYFGYQTFRELRKLKYSNVSLKNKTLQVQLYYALVTQTLIPVILLQLPATILFLSVFVSFDVGEFSGLVAMTIAVYPAIDPLPTMFIVTSYRHGILEIFNKITRIIMCRWNRPTRQGTSNTQSIETTRL

SEQ ID NO: 63 - protein, 346 aa, Caenorhabditis elegans
MLDWKLFQNYQLIGSVIGLLLNSLTISLVVNKSPQQMRAYKNLIILTSLFEINYSVLELLVQPMFHSFGSAFAMVINVEKCYLDRNVLMVLVSFYNAFVGSLLAMFCIQFTYRYWAISGNIWLEKFNGFRILWWALVPVLCGAIWWFVTYFPCSPRPSADEYLRNEIMNVFNLDIDKNLYIAPYFYETNSDGITDIYYPSFIAIIVNILITIVSLITVFYFGFRCYISLQKICKQNVSQNTRGLQKQLFYSLIAQTLIPLFLMYIPGCAMFLLSFLTIDVGSFTGIVTVTIALFPAVDPLPTLIMVKCYRNSLRSYLRVFLSAVSKMFQTPDVPANVTELSKVTRL

SEQ ID NO: 64 - protein, 349 aa, Caenorhabditis elegans
MVNWEQILYSAQVAGAGIALFLHYILIKLIINHSPKEIGDYKNLMLFISVFEIIYAILDVIVQPIFHSFESTFMLIVDTSSSKVNKKLWEILAVIYCGFYGSSLAIFSIHFAYRYWVVSGTHQTVLNSFHKTTVLIWLIAPFSVGLIWALVGYFLCYPRASTTEHLNDNVRARLGLNISDIVYFAPYFYEKNEMGQNVIYWPSFIGIMLDSMSINISLMFSAYFGIKCWLRMDAIFSSSSTHFQNLHSQLFYALVAQAMIPIFLMHIPALTMFIFTFLNFDAGFLSGTVSLTIALFPTLDPLPTMLIFCHYRKAITNYIRTRYKKVRKTKFCRCLVAKKSRNPNSSITL

SEQ ID NO: 65 - protein, 352 aa, Caenorhabditis elegans
MASWKQLQDNIQIMGAGVALFLNCILINIITKHSPKEIGDYKYLMLFISCFEITYSLLDVLVQPMFHSFQATFVLIVDTSMSKIDKLFWQTFAFIYADFFASTMAIFSIHFAYRYWAISGVNENMLKWFRRPRIFIWLLAPCLFSAIWTIDITAGCLPRKSSNDYLRDSMSERLGLNVSEIVYFAPYFYEFNENGEKEIFWPALAALFLNSSTIIISLVFSIYYGVKCWRRMHAIFSSSSSQFQNIHSQLFYALVAQTMIPVFLMHIPVLTMFIFSLMEIDAGSFSSIVSMTIALFPTLDPLPTMIIVSQYRNVIKNYFISRFKKFRNSKCGKFLKRKKKRVNRNTAVVLQS

SEQ ID NO: 66 - protein, 331 aa, Caenorhabditis elegans
MIGVYDLPQYLHIFTKCSLFFAILFNTFLVYLILTKSPRQLGVYKYLMIHYSYRSSVVVLITTSDKLFSRDILLTLNSFYWGFFGSSLAIFAIHFVYRYLVISGNALLQTFQSWKLILWLMIPLVIGFIWSLTGIFLCGPTEEFTEFMRNDVWEVFHENIEEFEYLGALMYEKSWATKNMIIYWSPIAGMTIMSLTVLASFLVIVICGYKCYLRIKLLLKNGGTSSARSQVLQTQLFNALAIQTLIPILLLHTPVVLKFSFAIFDAGLGAYCFAMSITIALYPAIDPLPNFFIISPYRKAALGCFKLRKRQIQTVDQNHMRRMPIRIVRTV

SEQ ID NO: 67 - protein, 367 aa, Caenorhabditis elegans
MFRGLEWGTLLIQIQQLSAAFSISFNIFLIHLIVNKSPKQIGVYKYFMLYFSIFEIFYGIVTALTSPFHHTQYATYSTIISSKDRALSHFVLNILNAVYWACYGISVAMFAIQFIYRYLATVKSDLARSFQSWKILLWFSLPLVFGTVWAVAGYVFCAPTQEVTDFIKNSIHVTFGLEESEFVYLGPRIFKEHNGTITFNIKPSIGLALNIMTMNISFFAILFFGLKCYYYMRKMMSQSGSSKSIGLQRQLFFALVVQTLIPVVLMLSPFTFALILCIFDINDDVIGGIVVLCIAIYPAIDPLPNIFIIRDYRRALLYYVLRVKNKLFCKTNVISASRNTSCYVDGQISNATGQRAFSNVSMTAGTI

SEQ ID NO: 68 - protein, 367 aa, Caenorhabditis elegans
MFSGLKWGRLLIHIQQVSAAFSILTNIFLIHLILNKSPTQIGAYKFLMLYFSFFEIFYGIVVALTSPFHHTQYATYLAIISAKDRDLSHFTLNIFNAMYWGCYGMSLAMFGVHFIYRYLAACGSQLANSFNTWKIVIWFLLPLSFGAIWSFDGYFFCRPTEEVTNFIKDSVYVTFGLKESEFVYLGPRIFQKNENGIIQFNVGPSAGLGLNVMTVNISFLAIFFFGIKCYFCIQNMVKQSASSKSNALQRQLFYALVIQTLIPVIFMQLPFTIVLILCIFDINDDVISGLAVMSIAVYPAIDPLPNIFIIKDYRRALLNYLRWIKNRFLCRKHVVSDVRNASYYTDGHTTKNAPSAPSHVPIVHMNT

SEQ ID NO: 69 - protein, 355 aa, Caenorhabditis elegans
MLGKQWSDLLKLIQDVSAGFSLIINTLLIFVILTKSPKQLGAYKCLMIYISVFEIFYSILDVVLVPQHYSHGSTFLVIVGIKDKLFSPEVLLFLSSCYWRCFGASMAVFAVHFVYRWLVVTEHALLKKFEGWKIWLWFSIPFWYALTWICTGYILSAPNGRTSNFIRVENQWKFRENVKEVFELEFDEYIYLGPFLYKKKENGTLTVYIMPFIGLGIISSTIISSIIIVLVIGILCYRRLNSIVVTTMNSVNLRNLQRQLFYVLVIQTTVPFVLMHIPAVIMFAFVFLDIDLGVYSAVVSMTITIYPAVDPIPTIVIVENYRKTVLKFFGCFKTTHQIGTMTIAPTQFASSTHVN

SEQ ID NO: 70 - protein, 347 aa, Caenorhabditis elegans
MLGKEWSALLQLVQHSTAVFSIIINTFLIYLILTKSPKQLGAYKWLMVYISVFEIFYSILDVVLVPQHYSHGSTFLVIVGIKEKILGPGGLLILNACYWGCYGASMAVFSLHFIYRWLVVTENPLLETFNGWKIILWFSIPLWYALVWISTGYILSAPNESTSRYIKDSVKEIFGLEFDEYVYLGPYLYEKAVNGNIHVAIKALLSLGIISVTIVSSLIIVLAFGILCYQKINQLVATTAASVKLIKLQRQLFYALVVQTIVPFVLMHIPGAIMIAFVFLDIDLGVYSAVLSMTIAIYPAVDPIPTLIIVENYRKTILEFCGCVKKSRISVTSTVERPKSVMISSNI

SEQ ID NO: 71 - protein, 351 aa, Caenorhabditis elegans
MLGKEWSALLKLIQDVSAVFSIVINTFLIALILTKSPKQLGAYKWLMIYISVFEIFYSILDVVLVPQHYSHGPTFLVIVGLKDKLFGPAGLLILNSCYWGCFGASMAVFAVHFVYRWLVVTEHPLLETFNGWKIWIWFSVPMWYGLTWICTGYILSAPNEHTSRFIKDNVKEIFDLEFDEYVYLGPFLYEKTDNGTIDVHIVPFIGLGIISGTIVSSIIIVLVFGILCYQKINKLVATTAASAKLIKLQRQLFYALVIQTLVPFILMHIPAAIMFAFVFLDIDLGVYSAVVSMTIAIYPAVDPIPTLVIVENYRKTIIRYLKLDCVKRSSVAVATSTTEARSAKASDPVPS

SEQ ID NO: 72 - protein, 340 aa, Caenorhabditis elegans
MATWHTILKVVQYCSSTFSIFTNLLLIYLIFKKSPKTMLFYKYLLIFTSVFELHYGIIDLLIKPEIISEKTFWIAETNSSKSLVSMTVGEVLLYVWAAFYGVTLGNFVMHFCFRYLTITKNNRWVSGIPVLCFWLCIPPFFGICFSSVIYFCLGSTDSLKAVVLTKIRKFEKFKSDDMSFYGFTLYTAIDNWSPVNWRSIIGNILIVMLILIAFFIMIKYGMKTYWEIRKLSDVAVNTSELSKSLQYQLFISLVVQAIIPVLLIFVPATFTVLALLGKGREFHGHIISASIALFPAIDPLPVVIIIKPYRNAVIGSFKSIFSKQNQNIHPSTLHAQVILF

SEQ ID NO: 73 - protein, 361 aa, Caenorhabditis elegans
MELKSSNSMKPASYQNWVTIAQLVAQIGFFTTTVFCGILIFLTVFGGQKNFGSYKNLLVLFSTVGIFFSVVELTLYPNVHSFYAGYFFYSTQRPFGLKIEIVQVLMAFYTSIYASTICMLAVQFVYRYWAIFNESLLHYFKGWRFLFSIAYSFIVGAQWGLSIYFFDEMDDYTDNYMRNEMWERYDINISQVAKMALVAYNDDGSIRWWNVCCIIDMTVFMIVQYSIVIYCAVVMYQKMEEKLQLVSASLRELHRQFFKTLIMQILSPTICLFAPVVFIIYLPIFNFEVSIPTGMFLCAFTLYPALDALIIMYIVKDYRKSAKRILKIMMDSIYKSLDLQPTRVEQTRTSSMPPSNLQNYL

SEQ ID NO: 74 - protein, 349 aa, Caenorhabditis elegans
MNNWGCILSIIEQSLSILSFLTNSLLIFLVFTSSPKTMGSYKYIMIFTSVFEMAYGLVHFLIKPEIISKDSYVLEETNSQKSLIPLSVARMLLLSYNGSYAIALINFNIHFIFRYFVMTGNAKRVTGKVIWIWLSIPFLYSIFYSAPTHFLLHSSESMDRVIKSEVEYLKHLPIEDVVYYAFNFFETTENSTQKSTNWTNIYGISFMMLVISTSFSITIIFAAKGYFEVKKLSSIATSHSSASKTLQAQLFYSLVIQTVIPVILIHFPTTIILINAFFGIGREVHGHILTVSICLFPAIDSLPSMIIIRPYRLAIKRVLKYPFRRRSSSIAASNTKYLSDVTSRVATNN

SEQ ID NO: 75 - protein, 348 aa, Caenorhabditis elegans
MSIDTWLPTLNKTRNVLTYFGISVNAILVPVIFLKSPKDLGLYKYMMIYISTFEIFFGCVELLTIPDFFTKDSAFFVMVDPAKTILPQFLIQTADLLFCGSFAVSLGIFGFQFAYRYQVLNGNSSWTSSRPLNFLFWLGSPLIFATIWSAAIAVFMPLNNFAKIVLIRESVFPSDVELDNIGFCGALFYPKSEDGTEVINWDSMRGVAVTTTILISSEITMFFFALKCFLATKSLMNQSGHSKNFRHLQWQLFYALALQTLIPITLIQGPFSTIYMTTLLLDCSTPLFGNFLAFSITLYLAIDALPTIFIIKHYRQAIFGYFKQFKIVRVQPKPYQVSTANIHRSSVY

SEQ ID NO: 76 - protein, 355 aa, Caenorhabditis elegans
MAELSPFSIDPWMPIIHRMERGFACFGILLNCILLSMIVHRSPSEIGVYKYLMMYITIFELFFGGLEIITVPQFHTMGSQFFVFIVPEIIEMSDFVLQISAMIYCGSFANSLAIFAVLFAYRYQVLSGNTSWTSLNLRNAMFWGTVPLFVGLFWTVSTRIFLGRNTFFDIALSRDPSLAKFQNIRFGFIGSFFYPQLADGTKVINWDSFIGMAFSTCILFGSEYLMLFYAVKSYLLTKTLMQSACSAIYKKLQWQLFYALVSQTFIPILLMQVPMSAIFVSIFFDMSTPTLGHIQTFTISIYLATDALPTMFIIKPYRDKIIYRIQCIASIFKAVLPGQSRTNSSVVEMSSRHIS

SEQ ID NO: 77 - protein, 321 aa, Caenorhabditis elegans
MVLLNDSSLWQPSSVSPEKATTFQGIERGFTCFGMFCNLVLLPLIMFKSPTDMGVYKFLMVYIAVFELFFGWLELMTVTNLYTQGSLFTVVVDPDEAFLPDGLLQISCLIYCGSFATSLAMFGVQFAYRYQVLKGQQSYPISLENKTVGFVAVYFYPGLADGSTTINWDSFIGMSLCTCILFGSESLMLYFALKSYLVTKSLMTSAYSANFQKLQWQLFYALVSQAVIPIFFMQIPLSAIYITLFANISTPFFGHLQELTISFYLATDALPTIFIIKPYREFIFSTLRCLKLCKSANSANQVGTHTAISLADIPSRYIVSS

SEQ ID NO: 78 - protein, 332 aa, Caenorhabditis elegans
MSWTSVQCILQKVCTPIAIIINIILIQLIWHRSPKAIGFYKYLMIYISVFEILYSLLDILAAPDFFGHDSIFIVITSSEKMIIPKVFQVPFTNIFCAMFGVSLANFAIHFIYRYLAIIKSPLLEPSVKLAIWFFIPIIYGVTWSGLLIAFLHPFEETDTILRKTYLLERNLTLSDITYVGTNYWIPTDNGQEVLNLRIGIGMTLIMSLVTSSIVTILVFATLCYHKIESLVKVSSNSTQYRLLQLQLLNSLVGQALIPAVLMLGPSSTAFVSPFFHEGSESIGALFGITISLYPALDPLPTMFVIKSYREAIFGCCRKTTRVHASRTSTAAS

SEQ ID NO: 79 - protein, 348 aa, Caenorhabditis elegans
MFPYYHIVERVIGIFGIIINATLIYLIAKKTVTKLGNYRFLMMHISLFELGFSVLHGITVPIMYTSECMNFLVLRVDKSLLPKPLLELLAVIFCNMFGMSISLFATQFIYRYLVLSRNKMLRHHDGRTIVYMILFNLLFGAVWGVLAWFTMSPFPEADQILSENFALPNGLSIEQVAYVGFIFYISDETSNNLRVHWESVIGIGIQCVFISISFCLIFIFGFKCYRQTRKFVSSQSTNAINLNSQLFNALVLQTIIPICLMHFPATIVYMAAGLNKSNEIFGQLLSLFICLYPVLDPLPNFFIIKSYQKVVKDFYSKILRRQPPSTIVRPGSNRTLAFPNASSIVHLT

SEQ ID NO: 80 - protein, 344 aa, Caenorhabditis elegans
MLTKIIFKRVFAIFGVVNNFLLIIFIIFKSPKQFGNYKCLMAYISIFEIFYSILDFLTVPTIYSHNSAFLVIIEKDSAIFPDSLLQVANISFCSLFGMSMAIFAIHFVYRLLVMIGPKYLYHYHLQKVLGLIGCTIIVGCGWTVVMHISFGPTKYSDSLISLEYLEPRNLTLSDVDYVGAHFHHTDSYGNQFINWNSMIALVMMTIAIMLSFTTVILCGLKIYKDAQENLSLRSSTDNNIQSQIFWALVLQTIIPVVLMHFPAGIGYLFSMLNRSTEILGEIPAITIFMYPALDPLPSFFIIRSYREAILELLGCKKSEMSVIPTEMSLQVIRTPAGKTPEENR

SEQ ID NO: 81 - protein, 344 aa, Caenorhabditis elegans
MFSSSREIFQRTCAFFGIFNNSILALLILYRSPKKLGNYKFLMMYISIFETLYSLLDFSTIPEIFSKDYVFLIIIEKRLTVLPNFLLQCALIIFGSLFGMSMAIFAIHFVYRYLVMTGSQFIKTHHLLKVLGLIGFTLCMGVAWSFLHSSYHPIPQADIFLDVEYLKPRNLQLTEISYSGPCFQVQDEKGVLRMNWDVVGTTGVMILLISLSFSTVFYCGISIYKNIKSMTSMRSSLDQSLQSQLFYALVFQTLIPVILMHIPASFGFLVSIFGNSIQLFGQLPTFSIFLFPMLDPLPNFFIIRSYRQAITEFFGCILSTTSSHKTDSNHKLEMRPRAAAIVVN

SEQ ID NO: 82 - protein, 345 aa, Caenorhabditis elegans
MFSNYREIFQRTCAFLGLFNNSILALLILYKSPKKLGNYKYLMMYISIFEIIYSLLDFSTVPEIFSKDSAFLITIEKRLAVLPDIALQFALIVFCSLFGMSMAIFAIHFVYRYLVMTGSHFIKTRHLLKVISLIGFTLCIGVVWSFLCILFHPIPQADLILTQEYLKPRNLQLAEIDYLGPCFQVQDEKGVYHLNWDAAGPIGIMTVLIGLSFITVFYCGYSIYRNIKSMAAMRSSVDHSLQSQLFYALVFQTLIPVILMHIPASLGFLFSMFGQSILFFGELPTFSVFLYPILDPPPNFFIIRSYRQAILDFFGCFLRKPSPNSSNNQSNPNQMELRNHVVASN

SEQ ID NO: 83 - protein, 362 aa, Caenorhabditis elegans
MDNENNSDSFSYYVTFAQRVAQFGFFATTTSCTVLILLTIYGVKRDFGSYKNLLLMFAGLGIVFATTEVLLFPNLHSYNAGYFFYSMERPFRLDTKNVSRFLVIYTGLYGSTICLLSVQFVYRYWAVFSESKLKFFKGWRFIFCIMYCAAFGADWGLSIYYFDEMDAYADHYFRWALILSAALFHKKNSRAEMHKRYRLNISEVACFSLVAYNFDNTPRWRNILCTISLFCIMLIQYTIIIYCATIMYLKMEEKLKLLSVSIRNLHRQFYKTLVIQIFTPTICLFSPLIFIIFHPLFNVEIVVPTGMLLCAITIYPAVDAIIIMYVVTDYRNAIKKNFKKVQQKLLSQRGMSTILIRTTQSV

SEQ ID NO: 84 - protein, 341 aa, Caenorhabditis elegans
MSFRSIFQHISAGFGVLCNFILIILIIKKSPKTLGSYKILMIYIAIFDIFYAVIDALIVPKMFSYNSGAFIIVSTNEALLPKSWLLIANLLYCTFFGTSMAVFAVHFVYRYLTVIGSYYIKNYDRQIIITLMTFPVIFGLVWFWMTHFTLTASDETEQFFNKYYYGVHNSASDIFYVGYYFYPEDAYGNKALHSRSFRGFLFQSTFITSSFGLILYFGTKCHLHTKSLSSKTVTSSSRFSLQSQLFYALVFQTIIPVFLMHIPSTISMCAAFTNISIEFISQILSCTISLYPALDPLPNFFIIKSYRNAITQYLTDFLRLLTCGKKHLNVIHVQSRNTSKI

SEQ ID NO: 85 - protein, 357 aa, Caenorhabditis elegans
MSSVHTILQRISAFFAVLNNLILIVLIIFKSHKKIGKYKYLMIYISIFEIIYAILDTCAVPEIYTTGSAFLVTVLGGQSFLPTYLCLLLSELFCVLFGISMAIFAIHFIYRYMVVSENKYLKKYDAHVISFLLILPLLFGVFWFWVVDYFLTPFDKADKILKEHFLDKMNINLTDVSYVGPYFWPIGKDGKTYVQWKSMFGILIMSIAITVSFSTIFVFGYKCYRKTNELIQSASQSESFNKLQTQLFYSLVLQTLIPVVLMHIPATIGFGASFFGVSFEFLGEMCAFTICLYPALDPLPNFFIIKTYRDAILKYLRKFKSIILCKGATVDIEIVAMSDLGSASMTPKPASLAAPIN

SEQ ID NO: 86 - protein, 354 aa, Caenorhabditis elegans
MFSEIRVIFAEKTRALFLDASAFFAISINFILIILILTKSPKTLGAYKYLMVYIAFFELAYAGLYVAEKPTFFTKDSAFLLITNTKNSIFPRRISMFVEELFIGFYGLAMAILAIHFIYRYLALSSNIWLHTFESWKLVLWLMFPIANAGIWWFVAAVIFAGKEDSDRYLKKFYLPLAQHLVNFEDIYCIGPFYYLKDVNGKSYINWISFQGTAISLSLICLSFTTMIYFGSKGYKSMSELMSLSTVSDHVKNIHSQLFKTLIFQTMIPVLLMHIPATVTYITSFFNVSSEIFGEILDLSIALYPVLNPLPTIFIVTSYRKAVIDLLCCRKKIVPLSTAEVTNQMATQPMASTL

SEQ ID NO: 87 - protein, 353 aa, Caenorhabditis elegans
MKIDDIVFLNSSAVFAIAIIFLLICLILKKSPQSLGSYKYLMIYIDLFELAYAFLYFLEKPKLLTKESAFFLIVNWKESLFPKFVVCVLDLLFVGCFGFSIAILALHFIYRFFSITNNPHLKSFDSWKIVLWFMIPALNGLAFMCTGGILMSADPQTDRFLNENYQEISENTTSLEDLYYVGPLFWPKHDNSTTEQYFSWKAAKACIIAMGVITISSSIMLYFGVKGYRMMSKLIATAGVSYKFKTIQKQLFIALLFQTAIPVFLMHLPATAIYVTIFLGNSKEIIGEIISLTIALYPALNPIPTLFVVKNYRKAIIDAFCYFFNIAGCGQKVVPMTITATASTRNSNILDRS

SEQ ID NO: 88 - protein, 352 aa, Caenorhabditis elegans
MQLNDAIFLNASVICAIFINFVLILLILKKSPASLGAYKYLMMYINIFELTYAILYFAEKPIMLTKESAFLIIMNWRASIFPKYVACTLNLLFIGFFGMSVAILALHFIYRYLSITKSNLLKTFDSSKIVPWFMIPLLNGITFMCTAGFLMRADEQTDRFINENYPPLVKNLSTINDLYYVGPLFWPKYANSTTDHFFSWKAARLCLIAMGLIGFSTSIMVFFGLKAYLVMKNLMSQSTSCDKFKSIQQQLLLALILQTSIPVLLMHISATAIYLTIFLGNSNEIIGETIGLTIALYPALNPIPTILIVKNYRTVLINILAYVKRRVFRQTAVTPLVLADVTTIAMQNLAPN

SEQ ID NO: 89 - protein, 352 aa, Caenorhabditis elegans
MQLNDAIFLNSSVICAIFINTVLILLILKKSPASLGAYKYLMIYINIFELTYAILYFAEKPIMLTKESAFLIIMNWRESIFPKYAACTLNLLFIGFFGMSVAILALHFIYRYLSITKSNLLKTFDSWKIVPWFMIPLLNGITFMCTAGFLMRADEQTDRFINENYPPLVKNLSTINDLYYVGPLFWPKYANSMTEHFFSWKAARSCLIAMGLIGFSNSIMVFFGLKAYLVMKNLMSQSTSSDKFKSIQQQLLLALILQTSIPVLLMHIPATAIYLTIFMRKSNEIIGETIGLTIAMYPALNPIPTILIVKNYRTVLINILAYAKRRVFRQTAVTPLVLADVTTIAMQNLAPN

SEQ ID NO: 90 - protein, 347 aa, Caenorhabditis elegans
MEINENVFRVLSACAISINFLLIILILRKSPKSLGSYKYLMLYINLFEFTYAILYCIEKPDLFTKGSAFFLIANFKQSIFPKLMACCSVLFYGGFYGITLAILALHFIYRFLSITNNRHLNSFNSWKIILWFMGPPISGIIFMLTGAFIMSSNGDSDRFLSENYPTLLGNETKIEDLYYVGPFFWPKYNNFTTDQYFNWRTAGGAMIVMGLISLSIAIMVYFGVKGYRSMNKLIAQSNSSQKFRSVQKQLFNALVLQTFIPVLLMHIPASAIYFTIFFDKCTEYLGKIFTLTVAMYPTFNPLPTIFIVKNYRNALKDSLICVEDAVLRRSRTVHPSSTAYSVNTQVS

SEQ ID NO: 91 - protein, 351 aa, Caenorhabditis elegans
MQIDDAILLNISAFCAVSINFLLILLILTKSPKSLGSYKFLMIYINLFEFTYAILYCAEKPDLFTKESAFFLIVNWKESLFPKFIACILDLLFVGFFGISIAILALHFVYRFLSMTNNHHVKSFDSWKIILWFMIPLLNGVTFMVTGGIILCADRETDRFMSENYPELVDDTTNITDLYYMGAFFWPKLENSQTEKYFSWKGAEGSIIVMGLIGLSSSIMVYFGVKGYRSMNKLISQTTCSLKFKSVQQQLFHALVFQTLIPVFLMHIPASAIYITIFFGKSSEIVGQTLSLTIAMYPALNPLPTIFIVKNYRKAVKEVLMGFQNKITGKQRVSQITSTAFSTQSARQTNQ

SEQ ID NO: 92 - protein, 353 aa, Caenorhabditis elegans
MHLNSTLILNLSAVCAVLINFLLIVLILKKSPKSLGSYKFLMLYINLFEFSYAILYFAEKPDLFTKKSAFFLIVNWKESIFPATMSCLMDLLFVGFFGTSMSILALHFIYRFFSVTNSRYLKIFDSWLIIPIFTVPLINGVLYMITGGIILSADAETDRFMRENYLKVIKNQTNLEDLYYMGPFFWPKLENSITETYFSWKGAEGSLIVMGSIGLSSSIMIFFGIKGYISMNNLLAITSNSEQFQNIQKQLFQALCIQTIIPVVLMHIPASAIYITIFFEKSSVIVGETLSLTIAMYPAMNPLPTIYIVQSYRKAVKDYFISIKNTLLKKPTVIPVSHTVQVIPVSSIFTTTS

SEQ ID NO: 93 - protein, 306 aa, Caenorhabditis elegans
MLAQIPFNIISCLSLFLDIILITLIIKKSSSSMANYKYLMLISSFLKVFIGVLHFINQPKVHFYQASYVIYSENPVGLPRAVSFWVLALDCAAFAMTLYLLAFHFVYRYLADLKPDQLYFFTFPYSLIFTGIFSFMTLNWWLSAVFFAGESGSVDEYIGSNMLQKFNLTPVEFSYISSIFYKKNLQTGVEELSLHDFLLLINLMFIIDTGFLIIGYCWLKLQKVFSHTTKQYLSLSKRTLEMQTQLFKCIVAQTLFPMFFLLIPSGCILLFPLFKFEPGPVETIFLPMMGAQTVVDSMVPMYQVVP

SEQ ID NO: 94 - protein, 340 aa, Caenorhabditis elegans
MRTFSLIKSITQPIAAVLSVVVNFILITLVVTSSPRKMGSYKYLLIYCSGLSIAYAAFHFVAAPYMFNDDSTVVILVDLKSNMLENHPDVLKFTVVSGVAFFGTSIYAIAINFIYRYFAVQREGRLRYFSGWRLIFWILLSIIGGAILGLMFYTIGSRQEISDGLKVSLETLYDLNINRILYCTFPYWLPTVENQGLTVKDIMANLAITISMAFPILIIAFCGTKTYGKVKNLTEHGKNEYSKRLQLQLYKALVAQVIIPTIFLFLPTVFIGASPLFKLNIPWASLPLSILFSMFAVVDSIPIIFLVDEYRNALFAFFGGFCCANEVVPASVNETSNDQQ

SEQ ID NO: 95 - protein, 353 aa, Caenorhabditis elegans
MSRMEEVLADVISYSAYFVTLALNSTLIYLTKYCSTRLTIIYRRMIIGFAVFGIGFSTLDIVVRPIMHSYNGCFLYFSLKGSFRSSKAITEMLLAIYSAVYAAILSFLTIQYIYRVCVLRCPQLVQYFRGWRFILWLGYVFMFGLAWGVITYFYAYPDEYARDYVREEMYEQYKVDSDKVALFVLLAYGENNGTKFVRPQSLICIFGQMGIMSLQYMIMMICGILIYKQIKADLKETTMILNSKFQKQIFNALLYQLVAPSLLVHLPAVPLFFAPFFDMKFSFRTRVVVYFFSVYPLLDSLILLTVVSDYRLAVRKIVANKAVQLVAMLNVGTVTPTTATNQTAENRVAENAL

SEQ ID NO: 96 - protein, 352 aa, Caenorhabditis elegans
MTSSGIQRWEEIQHGLQHISEAISVIVNSFLVFLIINKSPKKLGSYKYLMIYISDFEILYSFVDFVVAPFFYSYGPALLVIVNLEESLFNKPIAFVLLCSYSGFFGTSMAIFGIHFIYRYLVATGSLLLATFSTWKIVLWLSFPIFYGVVWGAGSYFLCAPSEYTTEFVRENILNNFNLQMEDIAYFGLNFYGTDNNGKQFIVYEQVVGIVVNSFIITSSLSTAVYFGVKTYYKINELTNKVSLRTSNLQSQLLYSLVVQTMIPVILMHIPVTIIYTFAFMGHGMGTICGIASITISMYPALDPLPTIFIIKNYRNYVLNMFSCCSAKYESENNTASREAAVMRQNPNLRKI

SEQ ID NO: 97 - protein, 337 aa, Caenorhabditis elegans
MSSLPIYNIAKIFSTTACWTTMICNSIFIFLTMVHLKKVDLTYRKLLTVFATLGMFFSFIEMQIHPFFHSYNNSLINFNMAELPKDLATLQVASYSGVYVTIVSFFTILLAFRYWRMTGSTIVNCFTGWKIIFLISWPLFFGIAATGVVILFGPIDDYAREYTKEVMMESYGIATENISGYSVIAYDQNGNLHWNSLAFTSGIISLMEIQFLIVGIFGFRMYFRMNILLQNVSKSYEMIQRQFFKSLIYQITSPTFTFYIPAILILTVPFFDLKFNLPTGLIVCSFSIYPPIDSIIMMIVVSEYRVAIKKIWKNPKSFFGCVSVNGNSALEVRVVVL

SEQ ID NO: 98 - protein, 341 aa, Caenorhabditis elegans
MSSLPLYEAANIFSTSGFVATVFLNLTFIFLTIFHTKRIDTTYKELLIVFSILCLIFSFIEMLVHPFFHSFNGGLINFNMVKWKWLSEELITFIVVSYSGLYATIVSFFTVMFLFRYWIMMSSPLVGFFKGWKLIILISWSVVFGVFGGGTVLYCGWIDDYSHDYMRDVMLKEYNLDVDHVSGYTVIAYDQNGNLRWKSLAVTLCLMFVMGTQFLIVGICGFRMHFKMNELLKNLSEAHRKLQKQFFMSLVLQITSPTLTFYIPAVLILTVPFLNLEWSFPTGVIVCSFSIYPPIDSLILMLIVPEYRNAIKAIFKRPSTILNPKTTNRSSTVFSQRNEVV

SEQ ID NO: 99 - protein, 336 aa, Caenorhabditis elegans
MVWFLFYPFAVQASKVVFASTVLINLYLIYLTIAKTKRIAGSYKYMIIMFSTIGIVFCFMKASLHPYLHSHNSGLMFFSLGPDWENFKQVETGLMVYTGVYSAMISLLAIQFVFRYWTLFNDEKLKYFNTWRCVVWFLYVFLIGMGWSFMIYFCAPSDRYSRNYMRESLFDTYQMDVEKTVGFFVVVRREDNSIRWHNVAFIGGLIFDLIIQYIIVIYCGTTMNSKMQEKLASFSVANRKLQEQLFKTLILQITIPSIIFHLPFVPVLCAPLFNLEFDFESGMIYCLFSLYPSIDSIILMSVVQDYRQEIKKFQSIPSAISESVLKRFTQTPVVLF

SEQ ID NO: 100 - protein, 329 aa, Caenorhabditis elegans
MIDAGQLIVFTGLFTAFFVNSFLIYLTLFYITCIRGIYKYMIVWFAFGCIIFDLTEFISRPHIHNFNGSLTYFSHTILSEDFLYFWTIFIDIYGGMYCSLITIIAVQFIFRYATLLNDTRILQTFKGKILWLWVLLVIGVGALFCVTPLIMLQPDDYADEYVKDEFHRVYSRNITEIARLILVAYDENNNFRWKNLSYCFIGAIILNSLYSIIIYCALKMRHNLLKQLEHVSPEYRKLENQFFKTIIIQIALPTIFLTFPMMILLSTPILNLEVSFNSSIYHWGISFYPSLDSIAVMLIVSEYKVCIRKIFKCSNTVDTTNQTSLTNFA

SEQ ID NO: 101 - protein, 339 aa, Caenorhabditis elegans
MVKMTAATVLPFIAEIFTRVGFVCTCLFNAILIYLTAFHVEKITGAYKHLIILFSLICMSFSCLEVLAHPYLHSFNSGFIYFSLNDYLGASQKLLRFFIEAYSGAYASIMCMLAVQFVFRYAILMNRRTLISSFTGWNFLIWILYPSSFGVTFGFMTHFCAQAEPYSDDYMKKELYGVYNLEINETARFIVIAYNADGTMRWFNLIFLFGSMIILGFQYAVIIYCGVQMQKKMKKEMANFSVSNGNLQQQFFKALVVQITLPTLLFHLPALPVLFTPFFNVSFTFQTGFIYAVFSLYPPIETIAFMIIVKEYTNIFRKKVLRRPSAPDFRKRSSDISVF

SEQ ID NO: 102 - protein, 371 aa, Caenorhabditis elegans
MSSMFWVGASLLASEIGFFSTLIVNSFLVHLIIFYTKQVFGAYKYLVLSFSLMGIVFATAEFIVKPMTHNYKASFTFFTLERPFKCSKETAMILLAAYSSTYAATISLLAVQFVYRYWAIFHVRRLSFFNGIWILFWIFLAMMFGVDWSCSVYFLGMPDKVSEDYLRLEISDQYNLNITRLAYFSAVVYDSEYHIRWRSVMVMGSVSKVLSIQYAVMIFCGVRMHFKMAEKMEQFSITNRKMHKQLFKTLVVQITVPTFTIFMPVMFMFLIPFFDLQLGIPTGVLLCALSLYPFIDGLIVISIVSDYRKAAIEVFRRILSRITCGRFKLHQVKKYDFSVSGGGVGADGSTAGTIARTNRVGVNSRTTASTF

SEQ ID NO: 103 - protein, 335 aa, Caenorhabditis elegans
MMSFYDFFEVFTKVPIFITIVSNFLLIYLTIFQVKQIVGTYKYMIILYSVFGIGFSICDQIAKPFIHSYNGYKSLLYFSYGEGWFEASLFVRLGALVMYAGFYILIVAFAAVQFVYRYLALVNPDLTKWFQKFGVIFWILYPFLYGVVNSLSILFLTSPDGFTDDYLRAEIIEKYELDIENIARLVMIPFDTEKNLRINNTVYLFTVTFFITCQYLIIISCGVQMHLQMNKKLLKFSVPNRKLQKQFFKALLVQITIPAILFVLPAVPFMIGPFFNIKFTLKSGAVCALLGMYPPIDSIAFMIIVSEYRTLIKRKLTLKKTLGECDLTDVLSALF

SEQ ID NO: 104 - protein, 344 aa, Caenorhabditis elegans
MHISHEFSYTFTQIGFVSTLIFNLLFLYLTAFHIKKITGTYKLMVLIFTFIGIVFSAWELVARPFAHNYNKALIYFSLNSWLQEYPEFLQFAIILFASFYLVILAIIAVQFAFRYFTLCKPHLSKKFGGYGVIVWLLYSLISGFIYGGALGYFGYPDIYSDDYMSDVVEEWYNRTITSFPRFLIIPYAADGSVRWQNIDFLIVGVFILELQYAIIIYCGVRMHTILQKELQQQSIVNQKLQKQFFRALVVQTVVPTFLFVLPIAPFLIGPLLEPIIEIGMNFPTGWMYVILTIYSPIDTIAFMMIVQEYKKALREVFHPILPKRVKVMSELTMPTGPTSTSRAI

SEQ ID NO: 105 - protein, 333 aa, Caenorhabditis elegans
MELHELSYMFTKCGFGACFVVNSFFIFLTITSIKRIYSTYKIMVVIFALMGILFAGWETVARPFAHNYNKGFLYFSLSNSYQASREFLEFAIVVYGSFYLVILAFIVVQFIYRYLTLFKPVYLRKFKGKGMIVWMTYPLIAGAAFGGPLYCFGVVDEYSDEYLKKEIFEKYKVAIKDLPRFAIVTYDSEGYLRWRNISYLITSIFMMGSQYLIIIFCGIRMHLRMGKELKQFSVTNRNLQKQFFKALVFQTLAPTLLFVVPAAPILMGPLFDTEMSIRTGLIYVLLNIYPPIDSIAFMVIVSEYKQVIREIGKYITSTKPSRNSTTYQMTSIS

SEQ ID NO: 106 - protein, 327 aa, Caenorhabditis elegans
MLRYFEYLDIFTKLGIFTASFSNFLLIYLTLFYIRQIRGTYKQMVVILALTGIAFSSWELLARPFAHNYNRAFVFFSLNTQNSLFLVQISVAVYAGFYLFILAFFVVQFVFRYVSLVNPISTRKFGGFGCILWMGYPLICGGVYGGLLSWAGSPDEYSDDYLRNTFLDSYDLDITQTARFVLIPYASDDSLRWRNLSFIICGGSLLTVQYVIIIICAIKMHSAMERELRKFSVRNRSVQRQFFRALIVQTLVPTFLFVVPAMPLLMGPLFDIEWDLQTGGIIALLSVYPPIDSFVFIMIVSEYRKVVSNGLCRRKKISNHSTDVFII

SEQ ID NO: 107 - protein, 331 aa, Caenorhabditis elegans
MPHFYEISDRIAKCGVASVTIVNTFFIFLTVFHIRGISGTYKTMIIIMAVMGILLSILELLARPFVHNYNKGWIYFSLNSWMNVHEGFLKLTMIFYSSFYIVMLSHISVQFLFRYLVLVSPKTAKKFTGKGILFSLCVSIFFGVIDGVALMIFGLSDEYSDEYMMVEMLNKYELAIKDFPRFIIVIYGADGSLRYRNVMYLVSAGVDVAIQYLLIIFCGIKMHLVMNQGFKNVSVANKKIHKQFLRALIVQTIVPTVLFVFPAVFVLLSPILDLEMSFQTGWIYALISMFPSIDSIGFMYFVSEYRKVIKKIYLAMIPEKRSDQSELDINP

SEQ ID NO: 108 - protein, 350 aa, Caenorhabditis elegans
MEYIRMDELTKLISKVGFLSTTILGMLFVCLTVCFVKRDFGSYRNLLIVFSFLGFLFSASEYMIHPMIHSYNSGFVFFTEPHLSLVSNEIMKIGLVFFCGIYGSTICFISVQFLYRYWALFDAPKLIWFEGWMMSAWLIYSFGIGATWSIGIHYFLENDNFTLNYFENGVYDHYGWKLSAIPSFTFVIYTERGAIRWRNLACTIEMTMIIGLQYSIICFCGRKMSVGMKEKISMLSETSKRLHTQFFKALILQIVVPTILLFFPMIIIIYLPVFNLKFSFPTGILFSAFAIYPSIDIAIILYIVSDYRIAIKLLLKSIKSVLLSSSYFPHELSLPTCTPQTPLPRGTARI

SEQ ID NO: 109 - protein, 341 aa, Caenorhabditis elegans
MLNHKYTISFTSAGLVICFITNFILIYITLFHSKRIYGTYKLMVVMFSALGFLFSVSEFIARPFTLNYNRAVILFSINDWILSKNFLSIALSFWITFYLLIISLVGVQFVYRYLYIFHSTKLWYFDGVGRALWISYLLIPTIVYSVAFNQIFTPTNASDDYLREVIRKNFDFEISSVARFIMMPYNENNTIQWKALSLLISAGILICFQYFIFVFFGLKIYFNMKLRLKSFSACQEKFQSQLFKALVAQTIGPTIFLILPSAPFFVTTLLSPYTNMEINWQTGWLCSFFELYPISDNIAFMLIVSEYRNYIKSKLVCKTRREVGSKISIRATQFIANASDT

SEQ ID NO: 110 - protein, 346 aa, Caenorhabditis elegans
MFNHQHTIFFTSTSLLICSISNFTLIYISLFHSKQIQGAYRRMVVMFSALGFLFSLSEFIARPFAHNYNRALILFSINDWISSKSFLEIAISVWMTFYLLIISFIGIQFLYRYICLFHSAKVRYFDGFGTVLWISYLLIPAAGFNIAFYQLLKPTDTSDDYLRKVIRENYDLEISAIARYTLALYSESNVIQWEILSLIIAAGIVLCFQYFIVIFFGVKLHFKIKEKLGTFSPCQVKIQSQIFRALVAQTVGPTLFLVLPSAPFFLTTLLSPYIDMEINWKTGWLYTLIGIYPIFDSIAFILIVSEYRNYVRSKLFCKTNKSPREFGNKISIHPIRCINTEIVSDT

SEQ ID NO: 111 - protein, 364 aa, Caenorhabditis elegans
MVKTFHVRESTISQMQYIRMDELTKLISKVGFLSTTILGMLFVCLTVCFVKRDFGSYRNLLIVFSFLGFLFSASEYMIHPMIHSYNSGFVFFTEPHLSLVSNEIMKIGLVFFCGIYGSTICFISVQFLYRYWALFDAPKLIWFEGWMMSAWLIYSFGIGATWSIGIHYFLENDNFTLNYFENGVYDHYGWKLSAIPSFTFVIYTERGAIRWRNLACTIEMTMIIGLQYSIICFCGRKMSVGMKEKISMLSETSKRLHTQFFKALILQIVVPTILLFFPMIIIIYLPVFNLKFSFPTGILFSAFAIYPSIDIAIILYIVSDYRIAIKLLLKSIKSVLLSSSYFPHELSLPTCTPQTPLPRGTARI

SEQ ID NO: 112 - protein, 336 aa, Caenorhabditis elegans
MISYKYSIVISALGFILNLIVNGVFLYLTIFKIKKMHGTYKRMVITFTVLGTIFSAWEIIAEPFAHNFKNSLLYFSCNTWLGSKTWLRYMLAMWSGCHTLIIWFIAMQFIYRLVCLIDTNNIKKLEGIYGYLMIIVPFVIGGFFAVMVETLIAKDKMLDDNLRKLIFENYQLLISELPKYNITPYNLDGSVNWGNFGLLVIAVFLNSLGYLVILYCGVQMHLNMKKELAKLSISNQDLQRQFFKALIAQSIGPTIFLVLPMGPFLLSPLIPGLNINWQSGWIFCLVGAYSPFDTIMFMMIVSEYRTLLKNRVGYTVSAATPDYRTQDPATTGVQTN

SEQ ID NO: 113 - protein, 336 aa, Caenorhabditis elegans
MISYKYSTVISALGFILNLIVNGVFFYLTLFKIKKMHGTYKRMVITFTVLGTIFSLWEIIAEPFAHNYKNSLLYFSCNTWLGSKTWLRYMLAMWSGCHTLIIWFIAMQFIYRLVCLIDTNNIKKLDGIYGYLMIIVPFVIGGFFAVMVEMLIAKDKMLDDNLSKLIFENYQLLISELSKYNITPYNFDGSVNWGNFGLLVIAVFLNSLGYLVILYCGVQMHLNMKKELAKLSISNQELQRQFFKALIAQSIGPTIFLVLPMGPFLLSPLIPGLNVNWQSGWIFCLVGAYSPFDTIMFMMIVSEYRSLLKNRVGYTVSAATPDYRTRDPATTGVQTN

SEQ ID NO: 114 - protein, 331 aa, Caenorhabditis elegans
MFMFKLFGFFTAFGFFSGCIANSLFIFITIKYIKNISVPYKRMIVVFAALGLMFSGFEAISKPFTHNYNGTLLYFSATNFQLPINISNAFITVWSCFYLTTFSFISVLFIYRYLCLFDSSKTRFFEGFKGGLWMLYPLLPGICYASTIKYLCAPNDYTDEYVRDSVAENYGLNVSELARFSLTPYNSDGSVIHTSIIFLLIASSLINFHFSIIIFCSLKMHFNMKKELEKFSVQNQNLQRQYFIALVIQALVPTMFLITPAVPILIAPFLAPIVGIEVDWQSGNLYSLVGFYPPCDCISVALVVSEYRNIIKNKISMCCKNNAQVSVINSL

SEQ ID NO: 115 - protein, 343 aa, Caenorhabditis elegans
MWGRPSYLPHARFCIFMGELGFFSNAFFGFILVYLTLFHIKRQFGSYKYLLVNFQLVGFCFASCEYLFHTFLHLYNASLIYFSLSHPLGFSNLTMEWMMAVYTGLYSSTICLLAIQSIYRYWALFDTPKLEYFNGIYYFIWVGYYTFFGILWSLTVGYFFAMDEFSMEYLSKEISLRYERNITDTPILDLIAYQGNDFRWKNLTGALMMTDISTFQYTIIIVCGYNMYHGMQTKLSLLSAQHRRLHRQFFRALTIQVVSPTIILFCPVFFMIYVPFADLEMSFPSCIIQSGFTVYPALDSVIMMCCVSEYFRIFKKLFVSMKQPKSSQDDSEKKRIQMVNPKI

SEQ ID NO: 116 - protein, 340 aa, Caenorhabditis elegans
MPYFELASNVSKIAFSAGFLSNTFLIYLTVFHVKAVFGTYKKMVIIFAILGITFSGLEILAKPFAHNFNNCVMYFSVNTWIQPQSISQLLIAIWAGLYLVIVSFISVQFIYRHCCLSNVRWAKKFDGLGCFLWMGYPLIPGAIYASSFYWFCLPDEYSDDCVRETILKNYALATADVARFMVAPYTSEGSWRLNNSFFLLSGVVSIWLHYSVILYCGVKMHLNMKEELKKFSVVNRKLQRQFFKALVFQSIGPTVFLVLPVAPTIIAPLVAPYLSLEINWQTGWLYSIVGMYPPFDSVAFMLIVTEYRKIIRDRYLFVCTKRYLAGNIQVVSTSSQVVNN

SEQ ID NO: 117 - protein, 358 aa, Caenorhabditis elegans
MTVSFEEVSDNSYLIAVIFCVSCNILLLYLVYTKSPKHVGTYKYLMTFFALNGILHSVFDFITKPIFLMLDGNEKHGSILVYFVLNKRFPSKWWAVLASEIYGFFLAVIFAVHFIFRYWTITKNDKIRFFNFPYFICWIIGSYYFGVEYSYILHVEFSERPDKTEFIRQKMSEDFGHTMDEITYMAARFVKYSEEAGALTIDWRQVGFYFAATKTMILSFIILIYCGIAITKTIRKDLKSLRSKERLRLELNLFLALIVQTVIPVLMIYCPFLLMWNFPVFLGIETARLTGMGVALYPGIDPLAIIFIVANYRRALLKPFRKVFLVQPASSTVRDISSTSRALAQVAGNQVAPAVVIN

SEQ ID NO: 118 - protein, 339 aa, Caenorhabditis elegans
MSTPSSSSYVQWLNVSRITDFITFIMSTLINGVLLNLIKTSSPKHFGNYVYLMMAFSINSLVFATIHAFIQPIISTEKYVLFVFTSTNYLEVPRIFMRGLLSIYGTSYSQALVFIAVQFVYRCFAISRRKYLHYFKGKFLGFWFGLVGIFGVNWGLCIFLIARETPQVDEVLRPVMTSSFNLNMTEVYYVAASYAVENELGIRSLNWPTIFMVINFALIMGLSFSVILLCLYFIHHKMKGVTYSKVYEAVQKQLYRALLSQMIVPLILIYIPILIVMILPIFNVKNDASTSLTSILISIYPVLDPFAVIMIISVYRQGFFNMFRNKPVNNQVANLDMSL

SEQ ID NO: 119 - protein, 358 aa, Caenorhabditis elegans
MPILDGPTWLKVTNWFNIICFSTSIPINFFLLYCVVTQSGRNIGDYKTLLIWFAVHCMAFPAVNLITNMNFYTHEATLFILTVANRFNFPCLGVWMLLATNWICCGYSILSLNAQFAFRWIVMSNSGKNLFWRFRKEIFLNVLLGVTGFYSFSGFLGIQLTPAKDLAIQETLADAYNVTPDNVYYIAVQYFDRDAHNVKVYDTISFTVAIGNILIFFGMVVFIFVCGVRTFFAAQRNTAELLNHKQLQKDLTIALLIQTVVPSLLIFLPCAIFYLLPLFEQPLGVDANILLIAMDIFSNVGPISILFTFKNYRLYILKLCRRKIAQKIRCSVIEMTTVTENRVYAQNYSDWDIRFDMI

SEQ ID NO: 120 - protein, 331 aa, Caenorhabditis elegans
MGNVGFFSNAFFGFILVFLTLCHISRQFGSYKYLLVNFQVLGFIFATFEYLFHTFLHTYNASLIYFSFSRPLGLSNFTMEWMMGIYTGLYSATICQLAIQFIYRYWALFDTPKIKYFHGWYYLIWVSYYSFFGVLWAFAVGHFFAMDDFGREYLGGEILLRYERNITDIPVLGLIAYEGNSIRWRNVYGLSLMTLISTIQYSIILICGQIMYEGMRIKLSLLSAQSRRLHKQFFRALVIQITAPTIILFCPVFFMIYAPFADLEISFPSCIIQSGFTVYPAIDSIIMMSCVSEYGRALKKVYRNAKKFCAVKIPKDVSKDVVGANVITTKL

SEQ ID NO: 121 - protein, 362 aa, Caenorhabditis elegans
MQLNLNLSQYLELIGSSLSLLFNLVLLVIIIKFSRPEYGSYKLLMMVMATLYAIYSAIEVIILPSYLVFEYNYLLYTTQFVEYQLLSQILIVTFCSIFACMQVVLSTQFIYRYLSVASFHFLRERYFKGKRHVVWISLTSIFFTNWFLVAWFVYGNHGVYPKELEEEMFEKFDRNISQMAFTLVSYAKQGENGKVLPNYLNIAMIVYLLACAMIPMNISLSCGIKTWLKIRSTINMAQKSRHLQKQERQLFFALLIQFTIPFIGNTVPMLILFFCPALHISTEPYTNYICMPVPFYPIFDALATTFVIKDYYRGIMRIFGLSRYIKESSTATGIRVPANTLGEQSSVSINLRQINTIRVDNW

SEQ ID NO: 122 - protein, 338 aa, Caenorhabditis elegans
MSSEFLLGLAMHTSGIKYIISLASEIFLLLLIIFKTRASFGPYKYLMIVYNVVLIMYSTATTNANLAAHSTETSYVLFRMYNGPDRTLGPLLILQFCTMYVTMLIILSVHFIYRFVAIFHHRYLWMFSKLYLMFWVLGSFTLGLFLISLKYFFLGEFDYFTDQLTEEFKTNYNLTMDQVLYNGPIYYICDDNGECTKPIGVWLTMMALCSCFFICLGIMGYFGMQCYFKLAKLQSELSEHTRRMQKQLLFALAIQAGIPIIMMYTPTALLLVSPIVGVSFGAYSNIAIALVAVYPPLDQLAIIWIIRDYRNAIRRFICCEKTDRNKVQSLYSTGRTTL

SEQ ID NO: 123 - protein, 340 aa, Caenorhabditis elegans
MLAITSRCELVGVGIASFSNSLLLYMLTFKATSSYGSYRRLMLSYTIVEIMYTFFNKICGMMAHSTETSFVVFNVYQGYVSRSLAPIFLLGFCAIYYTLITLLVVHFIYRYIVICDSAKLKYFDGGYLLCWVFGCAACGISMVTVKYFAFPQKERLTNELRDDFSQYYNLTMEEVVYNGPNYYNCDENGKCEISLVDWITMIIFCCGLMFSVIIMFCCGYFCCMKLEKNKLNASHHTVQLQKQLMIALIIQSLIPITLMYIPILILFVTPMIRIAAGPYVNIAIATVAIYPPVDQFAIIYVIKDFRTAVKNFFKRGTKSGTSPSSAVLTTKKKAWHHLLN

SEQ ID NO: 124 - protein, 330 aa, Caenorhabditis elegans
MSAKWMLTLTSLCEQSGVGVATLSNSMLLYMLTYKASPSYGDYRRLMFSYTIVEMVYSFLSFTSGMKAHSTDTSFVVFNFYHGYVSRSIAPLFLIDFCGIYFTLILILVLHFIYRYFVVCDAGKLENFKGWYLMLWVVGSTISGFSMAYLKYWTFPEREHLTNELREDFLQYFALTMEEIVYNGPNYYVCKKFNDCKKPRADWITMFILCGGLIFSVSTMCFCGYSCCKKLGEHKNRLSSRTANLQKQLMAALIIQSVIPIIFMYIPVFLLFMTPMFRVGFGPYDNIAMATLAIYPPVDQFIIIYVIEDFRTAVKDLFKCGKMQESAPSN

SEQ ID NO: 125 - protein, 339 aa, Caenorhabditis elegans
MSARWVLDLTARSEEFGLVTAVFSNSILLYMLFYKANPSFGAYRRLMISYAVIEMVYSILSFTSGMMAHSTETSCISFNLYHGYVSRDLAPIFLVDFCGIYFTLILILVVHFIYRYVVVCDFHKLRFFNGPYLMFWVIGAAVSGFSLGYLKLWAFPEREHLTNELREEFSQFYNLSMEEVVYNGPNFYKCNEIGECARPSADWIMQLILTGGLVNSVIIMSYCGFCCCKKLRENRKHASCRTADLQNQLMIALIVQAVIPIVFMYIPILLFFTTPIFHIGFGPYINVAMATLAIYPPMDQFFIIYIIKDFRTALKEIFKCGKAVSDASSSSQAFSSRLT

SEQ ID NO: 126 - protein, 354 aa, Caenorhabditis elegans
MAISVQQVSTYAGFCLSILINSILMYMIRKKTTKQLGSYVYLMLSFSIFELVFSTVDVLNQPMIFVNEGEFLFFSTNPLHLHKTVAKHFNLINFACSGIIISLLAIHFFYRYLAVCNNQAWLQHFEMPKFFIWISIFVLFGLEWYLATLFLGEAKDTVCEVDIDALVEYYKVDPLTTVFVGIKYHVTTAPGTIFCGKSILLAVILLKIVVISCSIVTYCGIRIWREISIKKRVVSRRTLDMQRQFFRALVVQTLIPIFLLYLPLATMLLAPILMANLHKIDVIIQFCFVFYPILDPIAVLIIVRDYRRAIRNFLDEQIWKRFLGVLLPWLLPNRPIEVPPMIHVPQPVMPRFIY

SEQ ID NO: 127 - protein, 351 aa, Caenorhabditis elegans
MFGTVYLPYIKFCIFMGDLGFFSNAFFGFILVYLTLFYIKRQFGSYKYLLVNFQLLGFIFASFEFLFHTFLHTYNASLIYFSLSRPLGLSNFSMEWMMGIYTGLYSATICQLAIQFIYRYWALFDTPKIKYFHGWYYLIWVSYYSFFGVLWAFAVGHFFAMDDFGREYLGGEILLRYERNITDIPVLGLIAYEGNSIRWRNVYGLSLMTLISTIQYSVILICGHQMYHGMRAKLSVLSAQNRRLHKQFFRALVIQITAPTIILFCPVFFMIYAPFADLEMSFPSCIIQSGFTVYPALDSIIMMSCVSEYGRALKKLIWNTRQKYTVRSPGPAADESKETVKTGSKAITTKL

SEQ ID NO: 128 - protein, 339 aa, Caenorhabditis elegans
MLLDFQQTYAHVTFGLSIFSNCLLLSLLLFRSDRNLGSYKYLMFAFSFLGIFFSIVDFLNKPMVHIFGGAYLVFSLNSLGLPHFLANWFNALNCSCYGMTISLLAVHFIYRYLAVCRPNQMSWFMWPHAIVWFLFCSEISFEWWITAVLFAGETTKIDELIKDSMETNYNLTKGEFIYAASLYYKTDDSGAKAISWPDILFAVNVVKLISICMIIVLFCGISTFRKLRTLRHYSKRTTNLQNQLFKALVTQTIIPVVTMFIPAAVMMLAPLFEVTLGSYEVLVMPVITTYPCVDPIVVIFFVKDYRQAIWQTIRCKRCLFSRSRYSLRGTAVSFITEAS

SEQ ID NO: 129 - protein, 343 aa, Caenorhabditis elegans
MLNVTFSIITSYINASLAFISNSILICLIITKTPRNMCNYRHLMLIFSIFGIIFAFIDGTNQPMLHFYNGAYVIFSRNVLGLPRHVSFWYIALNCTCYSMIMLLLVFHFLYRYLAVCKPNMSKLFSFPYVTILILIFVFVSAEWLVLGVYMASENEIIDEHIRDTMLTNFNLSRLDFTYASSLFYRTDPDTGKDFASFPDFLFLINHCTTIIIGFSIIIYCWLKLRNELLHSDDQTQNLSQRTLDMQRQLFRSLVAQTLFPVFLMFIPAGILLCFPILRIDMGPIETIIIPLITTQPFMDALVPMYYIKIYRRAILKFVCGKRYHSRIHGTSSHSSKIFSFRT

SEQ ID NO: 130 - protein, 353 aa, Caenorhabditis elegans
MLKVTFSIISCYLNAFVAVFSNSILIFLIITKTPRSMGNYRFLMLIFSIFGIIFAFIDGTNQPMLHFYNGAYVIFSRNVLGLPRQISFWYIALNCACYGMIMLLLVYHFLYRFLAVCHPTRLKIFSYPYFSILVLIFILISAGWLILAIHVAGENPVVDEHIRDTMLINFDLTRFDYTYASSLFYRKNPVTKEEYASIPDFLFLLNLGLIIGTGFSIVIYCWFKLRKELLNSAGQIQNLSQRTLDMQRQLFRSLVAQTLFPVFLMFIPAGILLCFPIFKTNMGPIEIIILPLITTQPFMDALVPMYFIKIYRMAILKFFCRSKYDTRVHGVLSLAMDNSGTRGNSTKNVSLKI

SEQ ID NO: 131 - protein, 284 aa, Caenorhabditis elegans
MRIPFYTVSAEYLGFFVAFITNVTLIYLIITRTRQNFGSYKYLMLWFAAFSLWYSIIDILTQPAMHSYLNSFIVFCASWFKYDPLLASIIIPTYCTSYGLTLVLLAIHFVYRYIAMIHPNEIRWFKYPRALIVGSQGEIQIQWKSCLAMTNVYCIAITTLVTIMSLGYSIYIKMQSVNDMVAEKTRALQRQLFHALVLQTIVPIIFMYTPTTILFLCPIIGVELGMIANMTSVCLALYPALDPLVVMYFIKDYRSYLLKKMNISKKVSTVTGATSVFRNEDEII

SEQ ID NO: 132 - protein, 363 aa, Caenorhabditis elegans
MCSNRWLNVTYYVECICFGVAVFLNTILLILIREKPRLAFGKYKYLMMVFSILEILYAIMYFWCKPNAHVTQTSFTIFTILENSHVSKDIGVIAVTIWCSFYAMMLSLLSIHFFYRYTSVTAPILLMKRFSCRYIFKYTLYILTFSSIWGLSCYFLCGPTENKDYELKLEFEEAYCLEPDEYSYVGPQYFYEHRKIIDSNEEIREKIFHLPSFLGIGIIAVLMVGILVSSALFGAETYKILNAQGLACYAAKELQKQLFKTLVIQSSIPMIFMVLPITCMFLLPFFGVKVGEVANLIPMCAAIYPCLNPMIAMIFIKDFSNRIIEIITCSKGRRFKVGTLPASSADNTNTFNMQNLSRLSLTS

SEQ ID NO: 133 - protein, 337 aa, Caenorhabditis elegans
MCSTLSLKITYHAEIAGFSLSVFFNSVLLILISDMPRKTFGSYKYLMICFSICGIYFSCCDFWCKPYVHMSKNSFAIFNVLEETKLTQNTGVIALELYCSCYAIIISLITIHFYYRYLSVMFPVKLVRFSVRNLPFWILLVILNASVWFLLNSLVNGPSEIQDAILIPEIRQRACLERHEYTYVGNVFLYQDFETNTRKINIIAFLSFGIIGSVMTFSLATLGYFGAKTYFHLKKISSLAVSYQEIQRQLFQTLVIQTIIPITFLYTPVTLMYLFPVFGIQFVEIGYIAPPLVALYPCLEPLVAMYCIKSFRFRILGWLTCHKYKRNVVHVSFVQTN

SEQ ID NO: 134 - protein, 320 aa, Caenorhabditis elegans
MKWTIQLAYYIETIGFVTSTFLNSILLFLISKMSKQTFGNYNYLMFSFSSFSIVYSFVNFWSKPNVLITDKSFAIFVDLKETGFTKQFGAIAIGLYCSCYNIMLQLITIHFYYRYLSVTSPTDLSRFSVKSTPIWILFIISISFLWFSMCYFKNYCMEPEEYNYLGPQYYYQDVTGQTRFHIPSLLASGTMGALMCCSISAITYFGFHTYKHLANLGTIGSSETGDLQKQLFRTLVIQTLIPSVFMYIPVSCMFLFPLFGLKAEGIDTLVPISVAIYPCFEPLVAMYCIRIFRNRIFEVLSCKKVKKLMKISVVPISNQN

SEQ ID NO: 135 - protein, 344 aa, Caenorhabditis elegans
MNVSCAIPTSPFLKYLGHIFVCLTAPIYIATCFILIWKCPSFFNQYRTLLLRHIFTCIFMEYFMDAIWQLIVVVPWSALCSMGIGYQLPVLMFSIVVAGLCATGISIIHMFEYRMNAVTDDSIKVLRRVITGVKYYHYFMMTSCMCLLAASYNHLADQKAFKTKIENKYGELPSYIWCDNCMFINTDSTLVLIFVGVAASSQPLAAVYFGLSVYASKLGLQKLKASLSQRTISLQRNFLHSLYIQTAVHVIFISIPLGIFFLSFIIWIPSSAMYMSYILTAMCTQHGSLSTLALMISNKPLYSVFTKTFWRIKSSITGSDRVTAVEASSWYRSAIAVANAENQE

SEQ ID NO: 136 - protein, 356 aa, Caenorhabditis elegans
MDLIYDNREICKKPAPICYSMGLAMAHLIALPIYIMAFYTLYAEKSQNFKIYKRYLATHVISNFLFEFHLSVVMKPVLYLPYPVIRFSGAFFLTYINGFISFCIMYLFIASTGWSILELLYFRFKLISSNTVTSIWIAKSSVFVKNVRRILIVFSSCTFCFLLLGITGMFDQTAHKEKLEIINEFPELTCTSAVTLPKSSTDIKPIHLFNASVFVSIIVGSILCATMGSVSLLALREMVRECSSSLRTISMHRGFLISLFCQIGVHGVMLGFPLFVYMTSIVFHFDGNDVGYVAIVLASLHGAMSTLAMIVFTRPLLNFARSKLHSIFFPRNMSIRDVSFLSSSQSRHQSSAVNGG

SEQ ID NO: 137 - protein, 351 aa, Caenorhabditis elegans
MSKTQLDEYYNTTYLKCNLSDNFVASWKGVAYPNHIFQFIELPFQILAFYVIIAKTPKSMKNIKFPLLINHLSCALVDLSFCSLSTLYLFVPIHGAFGVGLLSWLGIGFQYQMFMLEIFGICAICSYTYLFESRSSSLPQNRFRISRRKIKFLYYFFVFLPFILIVIFLLNIPQDQDAAKLDALKKYPCPTVEFFNSPVVIAISDEDVVNIKNRFIIPFIGAHIVFNNSFHIFCLIYYLYISPPKTLSVETKQSQKRFLIGMMVQCSIPSLLGFIPIVIVFIAYRTGNHSQELVNFMVDCVGLHGLGESLTILLVHKSYRKAVFQIVCVWKPKKTTTSFQISQWNSHLVLK

SEQ ID NO: 138 - protein, 336 aa, Caenorhabditis elegans
MPTALEQYYATNYSKCNLPYNILATWQAVAYPIHIIQFCSLPVQVLAFYIIITKTPPRMKPMQLPLFLNHLFCALFDICMCTLSTLYFFQPIMAFASVGVLNWLGVPFVYQAVLGGAMLAGVAGSYVFLFESRSSSLPENRFRIYRKTSRFAYFTYFLTPFIAAYVGMVMIAEESDAGKLRALAIYPCPTREFFIFPVCVFEGTTSHIFLVYALVMSHTSGNIIFHVACLVYYLYVAPPRTLSQTTRRDQKIFLVCVTAQTSVPLLVIIAPAMTVLLASWAGYYRQEWMSLAAICVATHALAESIAIMMVHKPYRAAIRKMLRKENAIVIHRSVEL

SEQ ID NO: 139 - protein, 356 aa, Caenorhabditis elegans
MTSALEKYYATNYTKCNLEYNFLASWKGVAYPSHAIQVISLPFQILAFYVIIFKTPVAMKNVRTPLLVNHFFCAFLDLTLCTLSTVYFFLPMYGTFFVGVLSWFGVPNTFQILLVWLMVLLTVGSYLYFFEGRSSILVQNKFRITRQKTRVIYYFLFLIPWMSSILYVVKFIPEDQDAAKQFALTLHPCPTREFFTFDVMIFLADSILIEGFIWIFPIFGIYSASFILFQVTTLIYYICIAPSITISKDTHHRQKVFLFSILLQCFIPLTLVLCPVFLVFSAHLAGLYYQTMVNLTVCSAGLHGLAESIAIVTVHRPYRKAVSQMATEFKRRRRAVQVLPFLANHMRHSVTMRQSF

SEQ ID NO: 140 - protein, 352 aa, Caenorhabditis elegans
MTSALEKYYATNYSQCNLEYNFLASWKGVAYPSHIIQLISLPFQILAFYVIIFKTPISMKNVKTSLLINHLFCALLDLFLCTVCTVYFFLPMYGMFFVGVLSWFEVPNGVQLLIVWLSMTFAAASYVYVFESRNSTLVQNKFRMTQRRTRVIFYSLFLIPCLLAVFVGKVIPEDQDAAKLFALIEYPCPTREFFTSEVLILFADKTIIEGVVRFFPFGCAYISSFFLFQVATLIYYICIAPSNTTSRDTQQKQKVFLICILLQTSIPLFLGMCPIMLTFMAFLTGHYYQEMANLTFCSLGLHGMAESIAIVTVHRPYRKAINQMITDLKKRKSSIRVSPISVHGTSNSVTRG

SEQ ID NO: 141 - protein, 352 aa, Caenorhabditis elegans
MRSAIEEYYATNYSNCNLTYNLLASWQSISYSSRVIQLVALPFQILAFYVILYKTPIAMKISKTPLLINHSSCVIFDFVLCTLCTLYVFFPMYAFSFIGVLAWIGVPTLLQIIIIFVAMLCATLSYIYLFESRASSLLNNRFRITNNRSRIVYNCVILFPLILVLPFLFFVRLDQDTAKLDALKNYCPTREFFTTSVFIVLTDKTLMSYILIPLILFVLSVVGHYLFQMGCLVYYIYIVPSRSVSRETREMQKTFLISILLQTSVPFFVVIPAVTVFFLYSYGYYSQKFMNSVICCIQNHGIVESISVICVHKPYRNDIAIKIKSLKCQTTRNVIPVERPEGNLTKRQWQWR

SEQ ID NO: 142 - protein, 276 aa, Caenorhabditis elegans
MNPALEYYYVTNYSNCEFRYNFFDSHQSIVYSSYAIQLVSIPFQMLAFYVIIFQTPVAMKISKTPLLINHTFCAILDVVLCTLCPLYLFLPMTAVSCIGLLSWFGLPTLLQLSIICLAEILFIALIDQVAIRYAIIPLALAVSSVLGHFLFHMVCLVYYIYVVPSKFVSKETQGKQKTFLISILFQTSIPFAVVIIPLAIVFAFNSFGYYSQKAMNLAFCCALLHGLCESVGVIVVHKPYRDVIGLKIGRLLFKRSEISIHVQPSLTRASGNLTNF

SEQ ID NO: 143 - protein, 337 aa, Caenorhabditis elegans
MCEFNDLGLASQQGFAMVLHLMTVIQVPVHLFGGYVILFKTPQKMKSVKMSMFLLHFWSSLLDITICFLIVPYVIFPIPGGIPLGFLSFLGVPPGYQASILIICASYTAISIINFYKNRHHSMKHGPNSQNLKTRLCRYVYIAANCVAAVAFLVPIYILHPGQRDIQKYTIETIPCLPPKIYENPNFFVASTSISFILLDMGLLSIFVFAQIIFLIVYSVKELQKRLKNLSKVTSTLQKRFSNALYAQVSIPMIAYAFPTVYVFFSWIFGSFSQACNNFVFISLAFHGLLSTFTTLAVHKPYRESLKVFLPTCMTWRAKSRVSSVREVQLSAIVAIV

SEQ ID NO: 144 - protein, 334 aa, Caenorhabditis elegans
MCEFGDSGFASQQTYVATLHIMAVLQVPIHLFGGYVILFRTPAKLAAVKWSMFFLHFWSSLLDITVCFLVIPYTIFPVPGGIPLGVLSIMSVPSFIQAFSLVVCGAFTGISILGFFKNRCQSMKFGPFSQSLKTRLGRYVHIGMNYTMTFCFMIPIYIKLPGRQESENYTILTLPCIPENIYKNEKFFLTSTSVPFIYSMVGGLTVLITFQILFYVIYSVIELRKRIKKLSRVTSCLQRKFSNALYAQVSIPMIVYLFPMFYVFFTWTFDVFSQICNNLVFIFIALHGLLSTITMFIVHKPYRECLKLIIPRCPKWRKRSRVASVRDLHLSVII

SEQ ID NO: 145 - protein, 336 aa, Caenorhabditis elegans
MCLWRNSSYEFESFAPSILHRLAVFELPIHLLSAYVVLYKTPSRMGSVKWMMFTMHICGAYLDLFLSALSTQFFLLPAAAGHSQGVYTHLGMPVRWQAYMFISAICLAGVSILGFFENRYAALVKGRGASLIQEKQRLAYIGGHYIYAFIFILPITFTPPDQTYGKQYVKQMLPCLPQEIFDHPDFYVYAIEITLLTFIIGSAAFVITGEVIFYFTRIVVYLSSTKAKSQKTYKLQLHFFICLTIQITIPLLIVIVPIVYIVFAFANSHFDQILNNISLNIMAFHGLISSAVMLTIHKPYRKAVLKMLGFTYIKTKVNRSAVHMDGTFVVVSNNRF

SEQ ID NO: 146 - protein, 349 aa, Caenorhabditis elegans
MCIWRNSSYELDTFAPYLLHRFAIVEIPLHVLASYIVIFKTPSRMASVKWMMVFLHFCSAFLDLFIAIFSTQYYLVPIVGGYTRGVLSDIGISTDIQGHLFITTMCIVGMSILGFFESRYNTVVKGNRENILKAKGRLFYLGMHYLYALMFTLPLCYNQPDQMEGRKFVKRTLPCVPESIIDDPDFHIWLEEPMIYAIHYAITASVITLEVIYYFVHTALFLSSTKAKSQKTHKMQVQFFIALTIQIAVPLFIVIFPLSYLITAFITLHFDQMYNNLALNFIALHGLASSSVMLIVHKPYRDAVADLLRLRVIWAKCHRRSENSVGDASLMVVSSIVNIQRERKASNRI

SEQ ID NO: 147 - protein, 349 aa, Caenorhabditis elegans
MCLWRNSTYELDTFAPSVLHPIAMIEIPIHLLASYIVIFKTPPTMAKVKWMMMVMHFCGAFLDLLLSVLSTQYYLVPVVGGYMRGIFTDLGVSSIIQGHVFTVSLCVAGVSILGFFESRYHAVVKRNRESIFKSKRRLFYVMFHYVYGFTFTLPLLIHPPDQIEARKMAKEALPCVPHSIIDHTEFYVFVEEPYIFAIYYGITAAVLTSQAVYYFARTALYLSSNKAKSQRTHKLQVQFFIALTFQIAIPLCVVILPVAYIITAFITKHFDQIANNIALNFIAIHGLVSSTVMLIAHKPYREAVGNIFRLRCTWERCHRRPLNSISDQSLMVVSSVVVIRRVSRISSRI

SEQ ID NO: 148 - protein, 346 aa, Caenorhabditis elegans
MCLWRNSTYELDTFAPSVLHPIAMIEIPIHLLASYIVIFKTPPTMTSVKWMMVFMHFCSAFLDLFLSALSTQYYLVPVFGGYMRGILTDLGVSSIIQGHMFIVSICVAGVSILGFFESRYNAIVKRNRGSIFKTKGRLLYIVLHYTYAFCFTLPLLFYPLDQEEGRRFVKEALPCVPHSIIDHPDFYLFIDKPYILAIYYGMTATVFEIEAIYYFTRTALYLSSNKAKSQRTYKLQVQFFIALTFQIMIPLCVLILPIVYLITAFITKHFDQIANNIALNFLALHGLTSSTVMLIVHKPYREAVINIFRLRYICNRKPAISVSEQSIMAVSSVVVIQRVSRVSHRI

SEQ ID NO: 149 - protein, 326 aa, Caenorhabditis elegans
MCTWRENYLESSDFYVLSSHILSFIQMSINILGFYIIIFKTPKTLQPVKFSILVMHITCFWLDFNLSTLSIPYLIYSAAAGQSFGILAYLKIPMSFQFYMGATAVFLLGPAILLFFEERYDRLLRRDANTRSRFKKRVAYFLVNYPGAFTIKIPVVIDVSNSEQSRHNIAKKFPCIPSRIITDPGFYVVTEDLLKAVLLHLGILTFTTVQVLYFFYHTVKYLFKSKIISESTKRLQKQLFKALCIQVTIPTIAIFIPCVYLNTSAALDHLDMIENNTAIIFLSLHGSMSTITTLLVHKSYRKAVIKLILQTKIVSKPVTINRVSIV

SEQ ID NO: 150 - protein, 329 aa, Caenorhabditis elegans
MSCTYRNSFLESEQFYAISLHILSVIQVPLHIFGTFIIATKTPAYMKRVKITMLVVHLTFAWLDIYMTILSMPIFLIPMVSGYPLGLLYYLGVPVRFMTYLGYLSVFLTIPAMIMFFENRYNYLVRKDHMTRGRKIKRLLYFSLLYILSVITFIPPVIDNPNRVEVLEASHRKFPCLPPEIIDNPRLFVMGTDNNTFIACVVPYIIIGWVQILGFFVGTVNFIYRTKTMSLHTSNLQKKFFKSLCIQIAVPLVVLLIPESYILNTAISGNMDVGLTNILMIWMASHGLFSTVVMLIVHKPYRKATLSILGRPQAIKTAPVSIISKLFTR

SEQ ID NO: 151 - protein, 333 aa, Caenorhabditis elegans
MCSTSLNFLASDEVYSKLLHTLTMIEVVTHTFGAYIIISKTPKKFESVKTGMLILHFVGAIVDVYFSLLTMPVILVPVCAGYPLGILKLFGLPSSAQVYMGVCSLEVMISTIVIFLEDRRYRLINGQKDSTLRKWYRLLFATLHYALALTFPVPVYLSLPNQEDGKLVSQNSNQCVPSDVFNNPQFFLLDLTGHKIMICILCSLSVLLFQMSLQFGLIFRQLLKHEPVSRNTQRLQHQFFIAMSLQVIIPIVIIAFPAFYFGFSVYFNYYNQGANNLTFILISIHGVLSTITMLMVHTPYRKSIIEMLHLDSIQSGGRARLIWKFSTRTSNRF

SEQ ID NO: 152 - protein, 312 aa, Caenorhabditis elegans
  misc_feature (312)..(312): Xaa can be any naturally occurring amino acid
MCSTSLDFLASDEVYSKILHTLTMIEVVTHSLGAYIIISKTPKKLESVKTCMLLLHFVGAFVDVYFSILTMPVLHLPVCGGHPLGVLALLGVPTSLQTYGLRRSYSSTIVDIDFTVTRPAQLENGTDYCMQPSTFLPHFQLLYFSICLTRNTENCHEIIRALHLMFSIILIFFYLASLENTLFALCPRAFSIFKYFCKLGSFSVNCSKIDLFLEIKIVYKISILQAFNSFQSYLLFRLFTCSQYIVIITRVQIIRSLSFHYTEYYQLLQCWFTDLIGNRFLKCYTWNRITRRRAGNDIFGDFNQEEACINFX

SEQ ID NO: 153 - protein, 311 aa, Caenorhabditis elegans
MCSTSLDFLASDEVYSKILHTLTMIEVVTHSLGAYIIISKTPKKLESVKTCMLLLHFVGAFVDVYFSILTMPVLHLPVCGGHPLGVLALLGVPTSLQTYGLRRSYSSTIVDIDFTVTRPAQLENGTDYSPIFLNLPDQEYGKLMSRNINTCIASDVFNHPNFFLLGLTGKYIVICIVSALSLLHFQILLQIGLIFRQLLKNRPVSRNKNRLQNQYFVAMSIQLVIPIVILAFPVVHIVLSIYLGYHNQGANNLAFIIISLHGVLSTITMLMVHRPYRKSIFEMLHVESYHTAESRERHIWRLQSRRSLHQF

SEQ ID NO: 154 - protein, 367 aa, Caenorhabditis elegans
MGTTAPVVITPSSEGCLSPAPDPYKSMMHFTHVLTIPLYLTAIYALINNCPKTLKEYRKYLLWHTLGNLLFELYISLFMLPVTYLPYPVFRGAGFLKYLDISGLIQFYLLVICLIHTGLSILEMFKYRFNSTISDDTLNKKVLNYIVMFFWVIVIIIPVFCFATLPRCHPKQDHYKQDLYDKNPGISIHVLCNTVVTAPPLIDPVFTPLMTLIMMAMLLAATIIPQTFLTIWKKLDQLSKHLSKKTIQLQKMLLTSLFIQAVIHGVMLGAPLIGFIYAVVFVLPYNYIAYMLLLLISFHGSFSTIAMIAFTKPIREGVKSLFQSLFPFLILSEPRTEKIMVVTSTTSASTKQRDSIFMSNKNSFLSV

SEQ ID NO: 155 - protein, 333 aa, Caenorhabditis elegans
MCSTTLSFFASDINYSKFLHAFTILEIFIHSFGAYIIIAKTPKRLESVKASMLFLHFVGAFVDVYFSVLIMPVLHLPVCGGHPLGLLSFFGVPVLLQTYVGLSLPAVIVATIVVFLDDRRYRLVNGQKSSKIRKWYRLLFVTSSYVSATMYPAPVFFLLPDQESGRLVLKSKSQCIPTDVFDHPNFFLLDLNGNNIAICMLLLMIILISQLLMQFGLIFRHLLKSTPISRSTIRLQQQFFIAMSMQVILPIVIIAFPAFYILFSIISGYHNQGATNIAFMVMSIHGVLSTLTMLMAYRHYRESILEMLNLNLYRSGGSAQRIWKLSKRTITRF

SEQ ID NO: 156 - protein, 334 aa, Caenorhabditis elegans
MCSKTPILSDKDTYHANALHILTSFEVPIHIFGAYIIIAKTPNNMKNVRTNMLVLHLAGALLDIYMSCLEIPVFLLPACAVYPLGVLTMLGVSTVFQAYVGVSLIGVIGMAILMFFEERYHKLIRNPGVDRKRGWKYVVYIAIHYIISITFILPCFLNIPDQNLGKLMIMETNPCIPEEKINHPDFFLLITESGPLYLSLGIAALVILPQGAFFILSIFWYLFTLKSKSRATTRLQKQLFFAMCLQVAIPISAICIPAGYCVVVVVVGYYNQEANNLAVFTMALHGGLSTFVMLTVHAPYRNATLEVFGISFKRVVQKPNQVWNKSVNETGVVP

SEQ ID NO: 157 - protein, 331 aa, Caenorhabditis elegans
MCTETFSYLASDQLYAGALHIFTAFEVPVHLFGAYIIIFKTPDKMKSVRTSMLSLHLVGAFVDFFTSFLTAPVLILPVCAGYPLGVLGMLGIPTSVQTYFGLSFLAVLASAVILFFEERYHKLANVQRSSGRKSFSRKCYAIGHYMFAMLFISPCYFNIPDQEIEKLTINERIPCLPEEILSRTGFFILSIENREMYISLALLISVLVPEVLFFVLSIFWHLFNIKSQSRATNRLQKQLFFAMCLQVYIPFMVVTIPAAYCISSIVFGHYNQAATNLAMSSIAVHGILLTITMLIVHAPYRQAVLEIICNRSKMATINNPQIWKTVNETKL

SEQ ID NO: 158 - protein, 330 aa, Caenorhabditis elegans
MDCAETDHNEYYWIMHGIFIVSLPIYSIAIIALLQTKSPYFEKYKLFLIWHTSTNLLAELLNSWFLIPVVHVNLPILRFTGILSHWGFSGLFQFFVIGTMIYLTAYSVLEMFMFRFRASLFNYKSTYFYIYLKANIYLFRFAMLCFLTLNICTYSFAIDQQTVNKYSLSLKFPDAPSIILCYTVIASAPFADPATMFNVLIWLSVVIVTLTSTIATTVYLQRNLRENEHYSETVVRMHKMLLITLSIQTAIHGIMLGIPNALFIFAAFFGVRHESVAKLSFIFLTTHGLASTIAMVVLTKPIKIAAMELFKCRSGDKVVETDNRRMSRKL

SEQ ID NO: 159 - protein, 333 aa, Caenorhabditis elegans
MWPDSRSSLPLDTYYAGILHILTCIEIPLHTFGAYLIVAKTPKKMRMVKASMLMLHFSGAIVDFYLSFISIPVLTLPVCSGYPLGFSLVLGIPTSVQVYIGVSCMGVIGVTILVFFENRYFQLINGSSGRRSWKRKLYVLCNYAFSATFIAPAFLDIPSEEQGRTYTFEKIPSIPIDVPSRPGYFVLLIDNPTYSICVSLLVIIVCPQIGIVVLFIFRFIVNTKSHSRATQRLLLHFFIAMCIQLSIPFLVIFLPAAFIVYAIQYDYYNQAANNLAMATMAFHGVCTTLTMIIVHTPYRNATLSILHLKSEKSAKIVNDSNIVWKTNKGLQMT

SEQ ID NO: 160 - protein, 330 aa, Caenorhabditis elegans
MCSELPALNYFGSDTFYSSTLHVLTAIEIPIHIFGAYIIITKTPSKMQSVKRGLLFLHFAGAILDVYYSLIAAPVLTLPICAGYPLGISLLLGIPTSVQVYLGISFVGVIGVTIMLFFEDRYHRLVNGHRNDGEWCWWRILYLVIHYVLSVTYIAPGFFNIVDQDFAKSFVKIKIPCIPDEILHRPGYFVLAVDNTIPKYCIAFMLTLVMSQVFFYVGAIFWHLFHTVAQSQATNRLQKHFFLAICVQVFIPILLITFPVLYIVLAIWFGYYNQAATNIALLAIPFHGVLSTISMLCVHRPYREATFGMFYNKGDTSRPIWMTVHGTSIH

SEQ ID NO: 161 - protein, 329 aa, Caenorhabditis elegans
MCPETSSYLASDSFYAGILHIITTIGVPIHLFGAYIIIFKTPCKMQSVKAGLLFIHLVSATLDVFFSFLAAPVLTLPGCSGYPLGISLLLGIPTSIQVFIAVTLFGIIGVTIMLFFEDRYHRLINGHKSKNWIRIVYIVIHYTIALSYVMPTYVSAPDQDIGKIWMKQNVPCLPEEVLHRPGYFVIATDNTIPKTCLAFMLTLVMSQVFFYVGAIFWHLFHTISISAATNRLQKQFFLAICIQVFIPLLLLTLPSLYIVLAIWLEYYNQTTTNLAVTMIPLHGVLSTITMLMVHAPYRQATIDTFCGSSTTKSNSPQIRITGNELQTVF

SEQ ID NO: 162 - protein, 329 aa, Caenorhabditis elegans
MDCSLISTAEYLDVLHFLFIVSFPIYTVAIIALFRTKSTYFETYKHFLVWHTASNLISEIYNAWFLAPKVHLPYPLIRFTAIMTQLGFSGLFQFYTINALIHQTGYSIIEMYMFRFKASTYNFQSTCFYVYLQINLYIYRITLVLFFVVNITTYNISLGQQIISKQNLLIQHPEAPWLVNCDSVVVAAPFTDPISMFNVVVWIVIIFVASTSTFSTTIYLQKHLSKSEHHSPAVLRMHRMLLITLFVQTAIHAVMLGIPNSMFIYAVFFEARHEFLAKIAFCCLTYHGLASTIAMMTLTKPIKITILQMLRCHALKNSVSTVQYSSQNT

SEQ ID NO: 163 - protein, 325 aa, Caenorhabditis elegans
MCSPPSFLATDEFYSGVLHILTAIEVPLHIFGAYVIVTRTPSKMSGVKASLLLLHLVGAFVDVYLSFVTTPVLTLPGCSGYFLGVTLWLGLPSDVMSYWDISLVGVLSVTILMFFEDRYFRLTKGPTGSRSWKRVFYITLHYFISVTFIAPAYYKKMDQQLGRLLTKQTIPCMPGEVPARPDFIVLSIDKTLPSLCFAFMFALIFPQILFFVIRISWFLYHTVSQSQATNRLQKQFFVALCIQVFIPLVFISIPVAYIILAVYLDYYNQAANNSALIAIAFHGILSTLTMLIVHTPYRHATLEFFNIEQKPNTVRSSHVGGDGKI

SEQ ID NO: 164 - protein, 331 aa, Caenorhabditis elegans
MATCQNTQNFLDTDDFYSIFLHILTIIEIPVHGFGVYIILAKTPTKMKSVKGNMLLLHLVGACVDGYISFFTSPVLNLPACSGYPLGVLTKLGVPTAIQLYFGISSVGVIVVTILIFFEDRHHRLINGHGGRGWRRALYIAVHYTISLTFPIPTYLNIPDQELGLELTITEVPCLPLDVFNRPGYIILSIDNSIPCLSMIFMLSLFIPQIIVFVISISWHLFRTTSQSAATSRLQKQFFFAMCLQVFIPIFVLAFPVIYIIMSIVLGYFNQAASNLAICTIAFHGVLSTVTMLIVHTPYRQATLEIFHLSSKRGANSQLIWKTVNRSQQDN

SEQ ID NO: 165 - protein, 336 aa, Caenorhabditis elegans
MCSQNISFFATDEFYSGVLHVLTSIELPIHLFGAYIIVAKTPRKMRTVKASMLALHCIGAFVDFYLSFIAIPVLTLPVCSGYPLGFSLVLGIPTDVQVYLGISFVGVIAVTILLFFEDRHHRLINSNISNGARNWKRVLYSIIHYIISVTFIAPGYMNIPDQLQGRATVQQEIPCIPKDVINRPGYFVLSIVNTIPCLCLIFMFSLIIPQALYFVLSIFWYLYHTVSKSQVTNRLQKQFFFALCIQVFIPIFVLSFPVLYIVLAIWFNYYNQAATNFALFGIALHGILSTLTMLFVHTPYREATFQIFHVSTKRTANGSQQIWRTTVGTQAQQSIW

SEQ ID NO: 166 - protein, 333 aa, Caenorhabditis elegans
MIDCIPESGYFDSPDFLANTMHVFTVIATPIHIFAFYCVLAKTEDQMKSVKMYLLNLHSSIVLFDYSLNFLSCPFILIPELAGYPLGIFKYFNAPVEYYVVEVGIAGACMIISVVSIFENRFYVICTFSWRDHWTIVRRPWLLLHYIEIFVFMFSLTLIVPDQKIGLELVFENLPCLPKDIYEAPVFVLASDYTYQLIAAVFIISQLCFEIGFFVTYLVWNSYKQLKDMKISKQTFELQRKFFIALVIQLVVPSAFFVIPVAYMLASFSLYYYNQAFTNVAFIVVSIHGVSSTLAMIFLHRPYRRAIFKMIYKRGSYPSTVSKIRSTTGITVI

SEQ ID NO: 167 - protein, 343 aa, Caenorhabditis elegans
MNYSCIAKANYFDNPEFFLLCMHIVTVISIPIHFFGMYCIIYKTPVVMKTVKWYLFALHVWIIAFDYSFSFLTAPFLLIPKLGGYILGILKYTSMPLDYLTSIVMGIGAYMGISIVSIFENRFYIVCDFAFKNHWVVLRRIWLATHYVIVPTFLTPIVFLTPDQKIAVPLMFQKLPCLPSYIYEAPILVLSESLTYHATISVVYIFLVLIESFIFVGYLIFNIVKQMKEHKMSPKTFELQKKFIITLLIQVSIPMICFIFTLIYIGFAYLINYYNQGLNNATLAIFSCHGSVSTIALIALHAPYREYAQDLLRKLSRMSPVEVSQNQIANLSSSNHSNVVVTV

SEQ ID NO: 168 - protein, 343 aa, Caenorhabditis elegans
MNFSCVAEFNYFDTPEYLSLLMHIVTIVSIPIHCLGLYCIIYKTPERMKTVKWYLFALHSWIVVFDYSLSLLTVPFLLIPKGAGYPLGVSQYTDVPLVYQTIIMMSLFAYMVISIVSIFENRFFNICTFSFKHHWVFLRRLWLAAHYIIVVLFMIPMVFLVPEQTIAVQHTFEQLPCLPNYIYNAPVFVLSEDITYHFIISVIFVVLCCIEISVFVGYLASNSLEQLKQKRMSPKTFQLQKKFFIVLVIQMSIPLICFLFPLISAALSVLLNYYNQGMINTGLIIASWHGIVSTISMLILHRPYRRAVKALFYKSEMSNQVEVSQSRFTNLRSSKTSIAVVTV

SEQ ID NO: 169 - protein, 334 aa, Caenorhabditis elegans
MHNSCRFTYFDSPEFLTLAFHTTSLIETPIHCLGFYCILWKTPEQMKSVKWYMFTLHTWILLFDYSLSLLTAPFVLVNEGAGYPLGLSKYTNVPEVFQFMIVIDFATNMAISIDSIFENRFYIICTFSWKHHWKFWRRVWLAAHYILLIVLLSVIPFLVPDQNIAVKKLFQNIPCLPKHFLEAPIFVVADDKTYHMIAAVFHIALICFEVFLFVVFLIRNSAKQLKEKTMSQKTFELQKRFFIALVIQISIPLACFIFPLAFAAFSVIIGYSNQAVTNVLVVTIASHGIVSTIAMLLLHKPYRNAVKEIWNRPFGKSADVSQNQGRNLFIAPRV

SEQ ID NO: 170 - protein, 343 aa, Caenorhabditis elegans
MNYTCIPDLTYIDTPDFLLTDMHIITGISTPIHFLGLYCIIFKTPKQMRSVKWYMLILHIYVMIFDYSYTIMTVPFVLSPFAAGFPLGLLRLTGMSVVAQSIYFIIIYFFMLNGIVSIFENRFYKICSFTSKNTWKFWRIVWLAGHYVIEVLLILPIKCFVPEQTHALQYVFQNLPCLPRYIYDGPVYVVAEDITYHFSFIFSLHVLICFEVIFFFGYLIRSGRQQLKGKTMSQRTFQLQKKFFIALISQVCVPSVFFIIPLIYVVITILTKYYNQGYLNIAFTIIAMHGLVSTSAMLSLHQPYRETILNTFQKTPRTLSKIQNLNDKRLHRCSARVAHISPG

SEQ ID NO: 171 - protein, 336 aa, Caenorhabditis elegans
MMETSYDRRALVLWFRRCSEAPNCGGAPAGKADFYGNIVGVGTCDIALDFLKSSHFFEVLAKSPLALLHFHFCGKCGILMEIHTGATWKISTSFPFPLCSNGFLGEYGPECFLILVVILIYNGLACIFIFLYRMEVASKHTAPTMLYKITHFQTYLLYFLLVMLSGITVFMYPVLKEQLDYKQRLEMKVGPIPTFMLCDSCVFMIYDSPIFLIWFLVAYICIALAYIILFSSGIVTYKALKVSRASAAVRKIQKNIFMSLVVSTITHLGLLFIPLATFFMLSLLVPEWSKSSIVKYTSDFMVIMIQQHGAVSAVTMFLTNNLLRRTAKQLFYTEMS

SEQ ID NO: 172 - protein, 351 aa, Caenorhabditis elegans
MSRSVIQLNITCIPQEDYFGSPQFYSTSMHIVSVIATPIHSLGLFCILFKTPDQMKSIKFYLLVLHIWVMAFDYSLTLFTIPFILAPGLAGYSLGLYKYFNVPFMIQVIIILALFAWMMFAAVSIFENRFYTICTFSWKKHWSFWRRPWLAIHYIGDVILLIPVAIFVPDQKTALIKTYKRLPCLPQEVYEAPIVVAADDYTYHFIAAFFGVILITSEIFFFVGFLVSNSIQQLKQKTMSQKTYNMQKKLLIALVIQSFVPMTFFMFPLVYGMVVVIKEYYNQAIVNILFINGSMHGFVSTLAMLFLHRPYREATLNIFSVLQKKPSPEISHNVVSNNYVPRNSTRRVQVW

SEQ ID NO: 173 - protein, 339 aa, Caenorhabditis elegans
MNLTCTPNFNYFDSPQFLSIGMHIASVVVTPFHLLGLYCIIYKTPLQMKAVKWYLLNMHCSVMFFDYSVTVLGIPFVLATKLAGFSLGLLQYSNYSFLLSVAVMALSCQFLTISIAGIFENRFNTFCNFFWVPFWKKFISPLFLPYQYIVYPSLLSSGLLFIPDQETALKAMFKTLPCLPSEIYEADIYVIVEDMTLHAIMISIGVSGVLIQVVFFVGSLLYSSLEQLRARTMSQKTFQMQKQFLIAVILQSSVPLVCFAIPIIYFLIAYLKNYYNQGIINCLFINTSTHGLISAIALVTLHKPYRAAVLVMIAKTPELRIGPKISQLSNLSRSGVVIL

SEQ ID NO: 174 - protein, 338 aa, Caenorhabditis elegans
MNTTCTPNFNYYDSPQFLSTGMHIASVIITPVHLLGLYCIIYKTPLQMAAVKWYLLQMHVSVMALDYSVTVVGIPYVLATRIAGFSLGLLKYSSYSFLLAIFVMIACLQFVTLGITGIFENRFRIICKFSWVPLWKKFITPGFLPGQYIVYPSFLLLGIPFIPDQKTALQDIFKTLPCLPREIYEADIYVIADDMTYHIMAISMGLSGAISQIIFFNGCLIYSSLEQLKAKTMSQKTFQMQKQFLTAVVVQAASPMICLIIPLIYFTIAHLVGYYNQGIINCLLINVSIHGLISTTALVTLHKPYRTAVRSMISKLPEPRRPKVSQLSTLSRSTLVVL

SEQ ID NO: 175 - protein, 338 aa, Caenorhabditis elegans
MNTTCTPNFNYYDSPQFLSTGMHIASVIITPVHLLGLYCIIYKTPLQMAAVKWYLLQMHVSVMALDYSVTVVGIPYVLATRIAGFSLGLLQYSSYSFLLAIFVMIACLQFVTLGITGIFENRFRIICKFSWVPLWKKFITPGFLPGQYIVYPSFLLLGIPFIPDQKTALQDIFKTLPCLPREIYEADIYVIADDMTYHVMAISMGLSGAIGQIIFFNGCLIYSSLEQLKAKTMSQKTFQMQKQFLTAVVVQAASPMICLIIPLIYFTIAHLVGYYNQGIINCLLINVSIHGLISTTALVTLHKPYRTAVRSMISKLPEPRRPKVSQLSTLSRSTVVVL

SEQ ID NO: 176 - protein, 330 aa, Caenorhabditis elegans
MDCLEPPPATFRILSHSIHFISIPIYCLALYSLIFIKSNVFTTYRIFLIWHVSENIFFEMYSAFFLAPALHAPFVVMRTTGILSHFGINSLVQFYILTFSIECSAVCISEMFYFRYKASLVSYKDHYFTYFLRFLVYSTRCFAIFDFIFPIVTYQDANKFQQIHKLALLQQNPSAQFLRCDSVYLLSAFADYVSIIVLSFWIVQFVVLCVAIPGAIVYITLNIPKSTSETTWKVQQQLLKSLAIQALIHAIMLGGPNSLFILALFLGYNSEELAYSAFLSLIYHGFISTFAMIVFTKPVRHHILECLKLRKTFETKGNSLKKSNQGTVTT

SEQ ID NO: 177 - protein, 323 aa, Caenorhabditis elegans
MSCSDEYSYFSSADFMASAFHVLTSIEVPVHIFVGYVILFKTPSRMGNVKWFMFHVHFWSAILDVSFTFLVTPYFIFPATAGYSLGAFIWIGLDPAIQVTVLVVEIGLTILSILILFENRYTFLASSTNHWKRVRQASFVILYIVALTYFIPFIFQVPDPEISVPVVLMQLPTLRCFYKGPIFVFTLDSTVVARITMLKLIIEFSYLGLLVYLTFQSLIKQTKNAVLSRNTLALQRKFFISIITQTIIPFAIIILPISYCGYSLSQEYYNQTFNNIAFIIISSHGLISTIAILLIHEPYRKTLFSSFCCSRTTRTHPTNSQDS

SEQ ID NO: 178 - protein, 330 aa, Caenorhabditis elegans
MTYDFCTSTFYLYTADFQRLFLHYFGFLAILVHVYGAYCIIFHTPSSMKSVKLSLLNFHFFSCFFDLGLSFLTTPYILFPALAGYPLGVLKDFGVRNEHQVYFMLLVGAYMLVAIILVFENRLLMLVPTVKFWKAFRVPWFIAHLILVTVFLLPIYSLIPDQEVAKNSIRRIAPCIPLYVNVDLVFILFIETGLFMRTTGVLILLGFIETWILAFITNEQLGKQINLILSKRTVELHRKFQKAFITQLTIPIIILIIPIIYVGVTSLLYFHNQAINNFIVIIVSSHGFFSTIVMICIHVPYREFTLRWLTVLAHVRMENLSSVRPSNNIT

SEQ ID NO: 179 - protein, 330 aa, Caenorhabditis elegans
MPHDFCTSTFYLYTADFQRLFLHYFGFVAIPVHVYGAYCIIFHTPSSMKSVKLSLLNFHFLSCFFDLGLSFLTTPYILFPALAGYPLGVLKDFGVRNEHQLYFMLVVGAYMLVTIILVFENRLLILIPTSKCWRVFRTPWFITHFIVATVFFFPAYQMIPDQQLAKNFVISIAPCIPLYVNADLVFVMLLETRFFLRAAGVLILAGFMEIWIFAYVTDRLLGQQINRTMSKRTVELHKKFQKAFLTQLTIPILILILPIIYIGVSCLVFYHNQAINNITVIIVSSHGFFSTIVMIYIHAPYREFTLRWLTVLTHVRLENQSSVVPSNNIT

SEQ ID NO: 180 - protein, 334 aa, Caenorhabditis elegans
MVYDYCSITDYLYTPDFFETVLHVISYISIPVHCYGGFCVFAKTPISMQSVKWSMMNLHLFSCLFDLGVSLFTIPYILFPVLAGYPLGLMQKFGVPIEIQVYVVLFVGAFMLVSITIVFENRLFVLVLSDKTLQRFRTPIYILHYILPIIFLPALVNIPDQKAGYRNLMDHFECVPPYVDIKKVFYLAITKRYFLGGCASFIVAMFVEVWFFAFITNRMLKKQMTKTMSQKTVDLHRKFQRAFILQLLIPFIIVFLPICYVGFSCFAESAFHNQALNNITIIIISSHGFFSTIAMIALHTPYREYTQQLFPFCKRLDFSSSNQTAPQSVMVTNM

SEQ ID NO: 181 - protein, 332 aa, Caenorhabditis elegans
MAPAYCNQTGYLHTADFQRLVLHVISFISIPIHVFGVFCVFFKTPISMQSVKWSMMNVHLFSCLLDLGLSFLTTPFVFFPLMAGYPLGFLEYLGVETEPQVYMIIFMGAYLLVAISIVFENRLFVLVMTNKNLHRYATPIYLIHYIIPLIVIPTVIKIPDQEEGKKNFINLFECVPPYVELKNVFYLILVKKFFLISCGIFIMVLFLEVWFLAYMTDRKLKQQMTKTMSQKTVDLHRKFQRAFILQLLIPFLIVFVPLGYIGFTAIFDYHNQFFNNLTLIIISSHGFFSTIAMVALHAPYREYTLKLFPFFKRLSSSPTNLTAPQSVMVTNM

SEQ ID NO: 182 - protein, 327 aa, Caenorhabditis elegans
MDNVSYCPIDYEFTYLDSPDFYTFALHAVALIAIPIYILRSLLIFHFWTCFVDILFSILVCPFAVAPLYAGYPLGVLKEFGIGVANQAILSMASTESMMVSILGLYENRYFIFKRNKKRWALLRFPWYAFNYFLAVAAYLPVYFMVPDQTNARIFILEHLPCLTPEILSGPMFIVALDVNLMLRSASLVSTFICIEGLTFFFLVKRSLNQYGTQLSKKTVEMQNRFSKAIILQLIVPSLYLAAPFTYLWYSGRFKYFNQKFTNLSFIFISTHGLFGSLFMLYIQVAYREVVIKFFVNTLKSFGINIERQYPQKKSSIFQSRMSINVY

SEQ ID NO: 183 - protein, 325 aa, Caenorhabditis elegans
MHSCSNPYLASPDFLKTAFHVITAIATPIHAFGFYCIIRKTPQHMNPVKWLLFNLHCWCILLDVTISFLGIPYILFPAMAGYGLGPIESPGLFFYLGVTFVTGVTTSIFVTFENRYFILFGESSAWRYFRKPAVVLSYIIVPLYYMPLQFFIPEQESGREISWALLDCIPELPRDGRELFVLATNLKGPGLTIFISEILPIVQCGTFVSLNLYNLTIARPSGMSKKTIQMQHLLIFALILQASVNTFLFIVPVNAVIYIVYIHHQNQLLNNLIVFCLAFHGIVSTLIMIFAHKPYRDFTLLPVKYFRPPQPSVSPGVFSTSNLAV

SEQ ID NO: 184 - protein, 334 aa, Caenorhabditis elegans
MIACNNHYLGSPDFLKMTFHVITGLATPIHAFGFYCIVKKTPIHMKPVKWLLFNMHCWCILLDITISFLGIPYIIFPAMAGWGLGPIESPGLFFYLGVTFITGVTTSVFVTFENRFFLLFGERTFWIHLRKYAIVASYVIVPLYYLPVQFVLPDQEIGREFSWTLLECMPELPSDGRPLFVLATDITAPAIGIGVSCFVPTVQCGSFLTLNIYNLIFARPSGISKRTIEMQHKLVIALIVQSSVTFVLFIVPVQCIVTFVYFHHQNQFHNNLIFFALAIHGIASTLIMIFAHKPYRDFVLSPIYRFTERTLIVAVAPSVFPTNSFSGAARNQAS

SEQ ID NO: 185 - protein, 328 aa, Caenorhabditis elegans
MNFCESNYLASPEFLKTTFHIITGIATPIHAFGFYCIICKTPAHMKSVKWLLFNLHCWCICLDITFSFLSIPYILLPAIAGYGLGPIESPGLFFYLAITFITGVTTSVFVTFENRFFILFAQKSFWRHIRKFAIVFSYIIVPLYDLPIQFLIPEQSKGRELSWRKLQCIPELPNDGRELFVFATELLGPAITIILAESVPTIQCGTFLALNIYNLIFARRSGISKKTVQMQHRLVVAFIIQTSVTLILFVVPVNAFISFIYFNYQNQFHNNLIVFAFAVHGIASTLIMVFVHRPYRDFVYSPFRRLFESGPTVYVIPAVSMSKAPIAP

SEQ ID NO: 186 - protein, 325 aa, Caenorhabditis elegans
MISCESHYLASPGFLKLAFHIITAVATPIHAFGFYCIVCKTPVHMKSVKWLLFNLHCWCIFLDITISFLGIPYILLPAMAGYGLGPVESPGLFFYLGVTFITGVTTAVFVTFENRFHILFGQNSKWRHFRKYAIVFSYIIVPLYYLPIQFLIPEQVTGRELSWAMLSCIPELPDDGRELFVFATELIGPAITMIVSESVPSIQCGTFLTLNIYNLIFARPSGISKKTVQMQHRLVVALIIQTSFTLFLFVVPVNVLIAFVYFDYQNQFHSNLIFFALAIHGIASTLIMVFAHKPYRDFAFSPFERFFIDHTTVDVLPVFSTSRTH

SEQ ID NO: 187 - protein, 318 aa, Caenorhabditis elegans
MQDGIPGYVIVLHSCTAISVPVNLLAIFCITTQSSNTMKQYKWYLLNVQIWIFLTDIILFALIAPRFYFPLIAGTMHGIFFHIGVPYDVQTIIGFGTGVGMLSACIQTIQYRHSKIVPPNSILARSSRIKAFLNFVRYFLFCQVSLPAVITEPRNQIEAKMRVAEKYQFYPDFFFDPKVYLLQETPFFVFVPGSVVIFYVFIELSFYILQSFHQLNKTNSHMSERTKMLQKKYFICICVQVLIPFLFCIFPIGFLCFAIVSGYHVQVWNDMAVIMFGLHGTVATLVMLPLYQPYRNFCKSLLCCAFRPFSRVQSLTVM

SEQ ID NO: 188 - protein, 335 aa, Caenorhabditis elegans
MQNCISGAGIPDTRYLSSPNFISFTLHCLTFLEIPVLSYGAYCILYKTPSRMKSVKLLMLNLHFWSCLSDLVISFVGLPYILLPAPAGYGLGLLDSPQILVYLMVTFIAALTASVLAIYENRFYTLFAQNSWWKKVRKPFLFSIYTLVPLIFLPPYFDLPEQESARQLVLSKIPCQPPFDFKHREIYVLALDYDVPVYCIAFGTLVLGVSITVFGWLIFHMLWFGTLSSSNSIRTLNMQRRFAISLTIQSTFMISVVLTPVLTILWIIFKWYHNQMLNNFIFITLSLHGVGSTIVMICVHRPYREFTFSKLCYFSKKWRASVIEKRSGGTLNVVL

SEQ ID NO: 189 - protein, 329 aa, Caenorhabditis elegans
MFLESPEVMLDVLHIITTISCPFQVFGIYCILFKTPKTMVSIKWILLNLHVCCLLFDLGLTVLSAPCLILPAMAGFPLGILWTIFEVPIIFQTYLIFTSLLMVCNAILVMVENRYYQMFARNKAWHHFRLPYIFLLTILNMTCALTLYYYVPDQPAALEYVYKQVPNIPAEFKSRPMFVLSIDIGVPIAEFILIIIFLFSNGIIFIALIHWNMNSSTIKQVKSTQTRKMEKKFLLAIYVQAGVVMIALLCPATYVIFSVFNDYYNQAANNCMFISFAFHGIFSTLILLWGYKPYRKFCMDIMKSIKAYREKTTLAVGTAEVSRLRNAMV

SEQ ID NO: 190 - protein, 326 aa, Caenorhabditis elegans
MDTPNFLSTSLHIMSCVEVPVHIFGAYCILCKTPITMKSVKWSMLNLHFWSVFLDLTISILVIPYILFPAVVGRSLGLLEFVKVPQKLQLYLIVSLFPTVGVSITTLLENRYYLMFARFRRWKYFRTPFLTSLYLASAFCFLPSYLMIPEQEAALAEVLEGIPELREYIKDFDFLVLSSDSYGFFLTLIILITLVTATSLTFAWLLHANIRDRAGNNASKRTVQLQQIFFRAILIQTSMPICVLILPCSYLAFSMFTGYFNQAANNLSFIITAFHGIFSTVVMIMVHKPYRIVVNFKIYRKLQILWGVDSQEHRSTFSLATISKSH

SEQ ID NO: 191 - protein, 358 aa, Caenorhabditis elegans
MSSNLSYFNYFSTPRFLNHAFNLTTCLQIPIHILGAYCILCKTPDSMKSVKWSMFNLHFWSVLLDLKITFLISPFVLFPAFAGFPLGVLKYTGISIDVQTYLILISYSALGSSILTLFENRYFLMFAKHSSWRNYRHPFLIINYIISSVYAMPAFLTIPDQKQAVAKVLNTLPNVSKEIRNAPIFVLATDFRLLVITVSLVAVLLVGESLFFVKLLFFNMRKRTRRMATSQYTLNLQRKFLRAIYIQVSAPFLLLSAPVAYLFTTIYFNFYHQVANNFCSLLLAVHGSSSSIFLILIHKSYRKVVWDLLKFDIFTRKNNQVSSFVVSRNSVAIDRRKKIENDSSWKRLISVFNRTIRV

SEQ ID NO: 192 - protein, 334 aa, Caenorhabditis elegans
MNFSYFDTPKFLSTSLHFITCIEIPVHVFGVYMILCNTPDSMKSVKWSMFNLHVWSVFLDLSISLMTSPFALFPVLAGFPCGVLKEFGIPTPAQIFIVVVLFAFVGVAILGIFENRFYIMFAENTFWKFVRVSYFAFNYILALLFFIPPYLRIPDQDLALQQIYKELPSNLPNWITKADVFVLATDITYSLLSVFLVVIFIISEILFFIFYVKIQMKCLARTLKLSKTTLKMQQKFLDAIHFQMYTPLIILVIPLAYIGYAIYFDFYNQAANNISFIIITFHGLASTIIMLLIHKPYREVCVNMFCFKILNKTTPAGHTRLNSLVTILPVRSRI

SEQ ID NO: 193 - protein, 323 aa, Caenorhabditis elegans
MNYSSYLDTADFQALALHIMIGIEIPVHFLGFYCILFRTPISMKAVKWGMLNLHIWSIGLDLGVSLLTVPYILYPALAGVTLGILSKFGFPVSYQTYLLGVLIGLLGVSIVSILENRYYLLFAREHWWRHVRLPFLIFNYIAACSYFTPAYYYIPEQTEALQNVFKMLPELPQEIYDAPVFVLATDFRYVVFPVCFMTTLMVAESATFIILIYGNMAERNKKLSLSRHTMKMQTTFLRCLNIQTSIPLLILLLPMGYLVISRIFKIYCQSANNLCFIIIAAHGLFSTFIMLYIHSPYREACFRIFCSKITRYSSRFSTVSTVL

SEQ ID NO: 194 - protein, 332 aa, Caenorhabditis elegans
MCMNTSFAKFLDTPQFLSTTMYTITIIGLPVHIFGGLCVVFKTPTQMCNMKWPMLTLLLWSASLDLSFGFLVIPFMYQPVLAGYSLGILNGFGVPLRVMYYICVVQIAGVTVSVCALFETRFFILYAKQSCWKHLRRPWLILNYTICVVYMIPTYLSIPDQKTGKAYQFSKYPCLPQEVYDEKVFLLTTWSTGYAYNMSLNTAVQQTLIFVFLIYWNMRKSMVEVKMSKRTLDMHRTFLKTIILQVTIPLITVMGPLMLNFFTIYNSYYNQGANNLSISMMATHGLVSSLAMIYLHKSYWATLLQILSPKFIFEDRETMMFSRVHQHPQQFS

SEQ ID NO: 195 - protein, 335 aa, Caenorhabditis elegans
MVDFSFLNEPYYFSMCLYVVGALSFPLHLFAAYCILFQSPATMKHVKWVMFNLHFWNSYLDLTISTFSQPFIIPPVFGGFFLGFFSKIGVNISLQVYIMVTLLMMVAVATTAIFENRFYIMFADHTWWSWGRVFFYLINYSLALLYFVPTVIQIPDQTVARLAIFELYPQVRHFDTPEHEIFVVAYDMEVREYIGYRQLISLGVIIIQGLAFLIILHCNISMSTRNMTISKTTLKMQRMFLNAVYMQIAIPAIIMIVPQIILNVLGYLYMNSPEMNSLAYMFMSIHGASASVIMLYFHAPYQEFCAKLFCRRFHSKPKIEVNFLNSSGTEGITPL

SEQ ID NO: 196 - protein, 336 aa, Caenorhabditis elegans
MNSSFLNEPYYFSLCLYTIGMFSFPIHLFGAYCILFRTSIAMKHVKWVMFNLHFWNSWMDLTISVLSQPFIIPPVFGGYFLGIFSKIGMDRDLQVYIMVTLLMMVAVSTISIFENRFYILFAEYTWWRYGRIVFYIINYSLALLYFVPTVIQIPDQNLARQEIFKMYPQVRHFDTTEHEIYVVAYDMGIREYIGYRQVISLGTVTVEGLVFLILSHYHIYVSTKNMKVSTTMKMQKIFLKALYMQIAIPAIIMVVPQIVLNVLGYLYMNSPEMNSLAYMLMSVHGASATLIMLYCHAPYHDFCAKLFCNRLCFNKLKVEVNFVETTGSADVHRITL

SEQ ID NO: 197 - protein, 330 aa, Caenorhabditis elegans
MEGESFFASAQFFSLTLYTIGFFSFPIHLFGAYCILFQTPESMKSVKWSMFNLHFWSSCLDMTVSLLTQPYLLKSTWSGIPYGILKEFNVPLSFQSYMVSTLFCMVAVSIITIFENRFFLLFAEHSWWRFARRPFLAINYILGLLYYVPTVLSVPEQTSARAATFKEFPEFRQLDTPENPIYVLVLNNPWVSVRQIAMEATVVIETGIIVCLLKFKMKNVVKEMKMSESTAKLQKAFLKALYIQVSLPLLVILLPSAVSVFSGILGISTQSVNNLVYITFSCHGLTSTIVMLIIQNPYREFCLVMVGKSHRRQKISATSTISGRSVVTTF

SEQ ID NO: 198 - protein, 268 aa, Caenorhabditis elegans
  misc_feature (268)..(268): Xaa can be any naturally occurring amino acid
MEGESFFAAFLVFMSRFSRQFVNSTVSTEVYLVCNTIWDFEGVSCPINTSSVHGYHLGRCFNHHHLRKPLLPSIRRTHLVAVCSSTIPCHQLHSRHSLPRPNRARRAGAKQCPSCNFQRIPRISAVRFPGKPDLCTGFEPMGFVTDCNGSDSCNRGLDYSFPAKINEKRSERGENVGDHCKVAKSFFKSFIYSGLTTVHGDSGSIYIPFFLLKISTQSVNNLVYITLSCLPLCYFKNPTENFVYWSEIGDRNHCHIDNSKICCDCFLX

SEQ ID NO: 199 - protein, 309 aa, Caenorhabditis elegans
MFLKFFGSIPVYSTIQYSIAVISLPVQLFGVYCIIAKTPPTMCSTKLHLLNFLMWSMAYDMIMTCVGQPYLFSTTMAGIPLGFLHMIGIGTGAQIYFGMTIAAFCAISTVQLFENRFFVLFAEKTWWRHVRYPFKVFNITFGVAFYLPTYYAMPDQYLPRQQLFMVHPELIQFDSPENPIFVMALDFPWIPVYSQRVFTIIIIIEMIVFGTLLQVNMNWAVRKMIVSNKTLQLQRDFVKSIKLQILIPLLFVVLPSAWLAIMGAYNISDQGSGNLARNIISLHGVSSTVLMIYLQKPYRQYFKQIFNFK

SEQ ID NO: 200 - protein, 256 aa, Caenorhabditis elegans
MLPISYPDVYSNILYAISGFSIPIHLFGVVPVSIISMFENRYFILFVENRPRRCWRYLRYPFLIINYLFGITYFIPIFLNVPSDQENARRILFNMYPDACEYVSDKNLVFVVDIGDIAWSKIRENALTFLLLSEIIVLAVVLRVKMSRALKTAISGDTLRMQKKFLRALNIQIAIPILLFFAPAATGILTSQQTSNEQLEHNLFVITTSFHGVLSTILMIYLQKCYRDVFIGLFGCRKPDLAINTVVLPSIRFSIA

SEQ ID NO: 201 - protein, 340 aa, Caenorhabditis elegans
MNLINANSSDLKNIYSTYITILNFIPIVTVPIYAEAIYCIIKRSPQFQKLYTCILTAHILGCLVEEFYGFQLFRPMVFVPVIGVYADGILSWLGVHPFIQLYGMMLSVQINLGILTHITFYRMKIIIPMSFRYYTRCIQFGILSTVAMYTGAVLTVNILFFTIENQQNAKSFYANSNTIPDMLWSEKYIVSSPRNPYYNSFLIGAAMCIGFYILLCIIIPSICYAVLHRTKDSLSEKVIKAQRAYLRTILLQVLVMVVCVIMPFSVFFAGAANLITDPRIIPASLIFGLCHGAATTLVHLLSNKPFRSTMKAQLLWVINCVTCSRHSSSNKVHTLSSIVQ

SEQ ID NO: 202 - protein, 333 aa, Caenorhabditis elegans
MTSSIWNENPTFYIWTRQLIFGLLTFLYPLIFYLVLCRTPKQFGNLKWFLSFHIFAITCQWLCSFLLIDFYTFVPSKITRIDGLLIDFIDAKVLYTSMYILSALSTSSCLLLFCNSVFNIFNMLRNNKSWLRTFSEWLAWTFVLMFPFMSLLGFTIRDQPNVKALTKQISSYYPDCIDNPNVIVPILPDAEGQKKSLVFFLMYLFTMATASILSAQLISHLLSKRMTNQSDKTKKMHQKFNRRSLFQVLIDISFTSFPYIISNFATLFQWRVPELTYFVDFMSKSGSTACIFVIFMYYDPYRKWLQEIVARKSTQTSVRHVTIAVMDRGGNEP

SEQ ID NO: 203 - protein, 334 aa, Caenorhabditis elegans
MNISHSIWNENPVIYVVVKRIWALLAGIIYPFAHFCVLTKSPKKCGYLKWVVYLHCFWITCEWLSGSFLIDIFDFQPSVTIRVDGLLNNVLDPVLLYTIYICVDSLSSTSALILFTSRIFMIMNMYRQYLSHLRIFCELMIYVLVVIFGLWTIPTAIWSIPDQTSEKLKISQDGQPYPDCLWDDNVVAVFDSGSQSEHLVSILTILNWVSCGIAIFVAAKIAFFLLAKRMVNESKATRRMNKKFNQRTILQAFIFLFFSCVPFTVLHLTIIFGLYIPGITYFIDIFSENHPTACVVALFLFYDPYQIYLFKIIGWNPKHMSKTSTSATFVVLRN

SEQ ID NO: 204 - protein, 345 aa, Caenorhabditis elegans
MKNVSHSIWNENPETYFTVKTIYAIFVTPIYPLAHYCVLTKSPKSFGILKWIIYVHCICFTCEWLGNVFLIDVYDFQPSILVKINGVLKNYIRPLNLYKVYVIVEGITETSGLILFTSRVLLIVDLYRPHPSIQRKICEFLIYCVVFSFGMWAIPMIVWQLPNQHSAKLEVIQNHEAYPDSIWDSNVVVITLADSVVDNTICALIVVNCVSIGFAIFVSAKIAFYMLSQRMINQSKATMKMHKKFNERTILQSILYFTFCCVPFSVLYITIILNIHIAGSSYFIDIFSENHPTACAVSLFLFYDPYQYYLIDLLGWRKRKNVTNASAIFVEKVNTVSRNSNVAFS

SEQ ID NO: 205 - protein, 337 aa, Caenorhabditis elegans
MSLNFSSCLIETYFDTHDFLGLYSHLISIIAIPVNVLGIWLIFYKTPIRMKNMKGVMLNCHVWGLVGDFMLGTLTIPYVFFPVIAGTPLGILTRFFDINAFFQTYLAVACIAEVGSSIVFMFENRQNQTVTSNWKISSATGRKSFVSINLVFPWVASTISLLRIPNQTWAKLELLKTIPCPSAEFFQLPIIIVTTEAKSIGLALLALVLFYAIQILVFIIHSSLYLCISTKSFSMSEKTKKLKRKYFIAVCVQVFIPFVIMAVPVNYYSFSIITDYYNQSANNFCFLIMSLHGFFSTIATIAIYENYRNYILHILRIKRNIKVTLIQTKSMAETTYI

SEQ ID NO: 206 - protein, 351 aa, Caenorhabditis elegans
MTTTTQLFEYYATNYSQICQKLSYERSYIETPEFLSLCAKIIGILGVPTNFFASYIITFHTPKSMTHLKLCLLNLKFWTLLIDLIYTVFLIPFVFYPIFAMGYIGIFGKVFGIPSEIQFYFAMACYGGIASAGILIFENRQHHMIPKGHKFRIQNCAFRVLLIIFNVLIGSSVMLMAIWLRADSNELKFKFLKINPCPDPLYFTPSTFAVDSQRNEFSICIVIVLTVVFIQYTFFISHCIWYIYSEDAVRYSKSTRKLQKMFLYASFSQLGIFVTVFVLPLGIFAMVLTTGYKNQGLLNICNLIIPTIGMNTSIGLVTMYKPYRDYFIGIFKEGGNGIVPPPSAFTKSVVF

SEQ ID NO: 207 - protein, 340 aa, Caenorhabditis elegans
MNEYYTTNYTKCNSSFTIFATPEFLSISSKIEFSIILPINFLGFYCIIFHSPKYMTTFKWHLFHLQFWFLMLTTFYSLLTTPFQFYPAQVRCYIGLFKYLDISSQYQMCIVHFVYSGIATAAIALFENRHKHLVPSTDVFYQIRDQHRILIGIFNFFAGATNSIPVLLQEESQELLKLKYLEILPCPIDLYFNSCSFAVVKQFDIWSGLAYFTNIMIAIEIIFLIVHSFIYLRKSQMVSTFSVRTKQLQKAFFKAALAQASSPILVLAVPVFLVAYVNSTRYYLQGLINVCILFISANSAISTFSLLLFNSPYRIFFKNLLISRSTPDIFNSRVAVISSL

SEQ ID NO: 208 - protein, 342 aa, Caenorhabditis elegans
MPIEVGPDWYIYGMHFSAMITTPVNIFGVYVILFCQTKQLASYRWHLLVFQVCSMTSDFLLNIGMLPVIFSPFPMGVTHGIFTRIFELFGSEISTEAQCIMVIVSLFVTAGSVELLFFLRYQAILPASHSNKLTTVFSVIIILIWQIFLITLMLLMFKLAIPDQKTARAQFIELYPDLQYLVASKHVFIVCVVVETIHVIFLCLCVFRIGIGGTIAIVLIWMSSRALKSVQLSPTTRRIHLQLIRSLCYQIAVPILAFYIPIISLVVPLIFTIPNSQTSYFISLLCMSTHTFLGTLSMLYFNRHYRQWLCSIIRSRKFSTSLPTSKIIVARERLNSYRPAVI

SEQ ID NO: 209 - protein, 347 aa, Caenorhabditis elegans
MQIDMSPDWYFYAMHFSAIVTTPVNISGIMIILFCQTRQLSSLRWHLLVFQIFSMISDFSLNVGTLPVIFSPFPIGRPHGVYTLIFQKFGFETSTEAQCILVFVSIYLTAGSVEFLFLLRYQAILPSGHPHKLSTFISVLLLSIWQVFLITMMLISFKLAVPDQQVARALFAQLHPELQYLMTDEHVFIVCVVVELIHVIFLFSCFFRLGIGMVTVIVLIWMSSRSLKSIQISLTTKRMHLQLIKSLCQQIIVPILAFYIPIIVVVVPLMLSIPNSQLSFFISLICLSYHTFFGTLSMLYFNPHYRQWVISAVRNRPMNTSTALTSKFVLARERSNFNAGRNVSAVI

SEQ ID NO: 210 - protein, 343 aa, Caenorhabditis elegans
MPAPCPATIPDGYLLTLDIIGGGSLSMNFLAMYMIWFQSPGMHGYKYCLTYMQFASFLVEFNLTVLVPAYYFFPLTGGIAVGEVVRKYISNHMGLTIWMFMFCFVLPASLSCFIYRHTAASQIQNNASKFHLKKLVMILTHIFPFLTALGTWNCQMTFDQKYEYVRKNYPQCLFWLEFDRFEAYDYQVNPWIVRTACAAIGFLMISTCYGIWLGVHTMVILQRLRGHMSVQTYQMHLTALISLGLQMATPTVFILPVYMFVAVIVTDAVDMQRIVSWAPCLMSTHSMLLVTVMIMSNASYRKVLKDKIWNVLGLTRLTGSHIGSEVEPSIRTSNNLIGSRPVS

SEQ ID NO: 211 - protein, 345 aa, Caenorhabditis elegans
MPAPCPETLPAYYMPTLHVIGAISIPMNVLGFYMVWFQSPGMQGYKYCLCYMQSVSMLTELYMSWICPSYFFFPLAGGYILEENFRRFVSTHASLTIWVFIFCFVLSAALTCFVYRHNAAAQINQDYSGKMYFEKLLLVLTHIFPFFTGFGTWMSQLTYEQKYDYVRQNYPQCLSWMAYDGFEAYNWQVNTWIPVAGLGGIGWVFVVASYCLYLGVHTMMILQRLRAHMSPQTYQMHRTALISLTMQMVIPGMLLTTPLYMILVVIMTNSLAFEELASTFSFLMSSHSMCQCFVMVMSNGVYRRVLKEKVFRLLRLPVPNESQVGSLVEPSMRISNNFVGTVLNA

SEQ ID NO: 212 - protein, 355 aa, Caenorhabditis elegans
MIMFTEAEVMSFSYAVDFGVPEWLKLYYHVISVVSTVISFFSMYIILFQSGKMDGYRFYLFYMQFAGWLMDLHLSTFMQFIPLFPVFGGYCTGLLTQIFRIDDSFQTTYTAFTICLVASALNSCFVRKHQAISKISSKYLLDNVTYCIVIFLLNIYPVIAASLLYLSMLNKSEQVELVKSVYPNLVDKFASLPNYVVFDSNIWAIVFFAFIFFGCTYTLVLIVTTTYQMFKILDDNRKHISASNYAKHRATLRSLLAQFTTCFLIVGPASLFSLLVVIRYEHSQVATHWTIVALTLHSSANAIVMVITYPPYRHFVMLWKTNRSFHFASSQYQRSTLPNTRIQTERSIAVTITTH

SEQ ID NO: 213 - protein, 315 aa, Caenorhabditis elegans
MSLNISFETPKWLVTCYHSSTIISVFINTLGIYLIKSQSGAIDSFRYYLLWFTICSLSSDICLFFLVQPIPLLPIWAGYINGPLWSVFGISTHMTSLVGSIAIGEQAAALTMCFVRKYQALSRIRNEVSKSSIIFVWIFTQIVIAVWVTFYYFTGMDRSTSLNIIAKNYPTLYPKFLELEDFQLYVRNEITTCFLISAGFMASIFIAIIIYSTVRMINILKNLEKHVSAVNFKKHKAAVGSLIAQFLTTPIAFVPPVASGVLLCFDFQHIQVTNWAMLALASCHGTVNCLVMILTCPPYRGYLKRHVLAAFRQNS

SEQ ID NO: 214 - protein, 323 aa, Caenorhabditis elegans
MDLNIDFEVPNFLIHHYYASGSISVLLNGLVIYLLIFHNGKIGSFKFYLLSFQISCVLLDLHVTMLMQPVGLLPICAGYSNGILSKVFKLHSHILMTLFVFFLSLQINTLIICFLRKHKAIMNLRSTSSVPNWIYHVLLGMIVFLIWSLTFTLSMSSESYEKQLEMLDIFHPLVSTKFRNLPEFQYYYLNTWMLIFFTLTIFETMKSFLMVSGTVTQMYRALKEVECQLSSQTLAKHKSALRSLIAQFATTPVAILPGGMIACTVIFPTEYSQKISWCCMMVMTTHSTLNSLVVILTYPEFRKIVCFWDKSVKKSTAVATVII

SEQ ID NO: 215 - protein, 335 aa, Caenorhabditis elegans
MSNPLNIDFEVPFHMIYHFYTTGTIAVCLNILVIYLILFHSGKLDSFRFYLLAFQIACTSSDVNIAFLIQPVGLFPICGGYGYGILARWFHWSSHTLMTLFTLFISIQIQVLTICFLRKHEAIMNLKSTVKSNNYWIYILTYIFCLSFSCLISFSIFIADATKEDQYKELQEHYPEYVDKFRELPEFVVYVINWRMKVFFVLTGFATLKTTVMVSFLVLRMFNALSAVKSRLSKNTIAKHKITLRSLVMQFMVTPISYVPAFMLLVVTLFPTEYSQQISWYSMMIATMHSILNSLVVITTYPEFRKTLMFWGKDSRSTNPILITSMIPSVSHRTS

SEQ ID NO: 216 - protein, 336 aa, Caenorhabditis elegans
MSESLNIDFEVPEHLINHYYVSGTIALLLNLLVIYLLLFQSGKLDNFRFYLLAFQVSCTASDVNIAFLFQPIPLFPLFSGYGHGFMSRWFGWSTHTLFTLFTLLLSGQIEVLTICFLRKYKAIMQLKTLSNPSSSLTYIIIYHLCMSYSLAITLAWYFSETSKEDQWKLISQDHPSLVPKYQQLNEFYYTYFNSAYIFIIFLVLTAAGTLKTIIVISLLVLRMFKVLSDVKSRLSKGTLSRHKVALRSLIMQFMTTPISFLPPFMLVVVALFPTSYSQAISQGSFMVSTTHSIINSLVVLTTYPEFRKILMFWRKKDARRIPTLLSSVRPTASPRN

SEQ ID NO: 217 - protein, 323 aa, Caenorhabditis elegans
MSEVVDFEVPWHLIYHYYISGSIAIFLNLLVIYLILFHSGKLDGFRFYLLAFQIWCTASDVNIAFLTQPIPLFPVFAGYGVGFLYDWFDCSSFTLFVSFTFLLSGQIEVLTICFFRKHQAIMKLKQSTDRLPYPFIYVLCMSYSVAISTACHLIRISKEEQWQLIQLNHSSLIPQFQRLREFSLGYLNYGLIAFFVLTAFGTFKTTIVISVLVYRMYNVLSMVQGQLSKTTLARHRVALWSLSMQFMTTPISFLPAFIVLVVTLFPTAYSQEICRCSLMVATTHSTVNSLVVITTYPEFRKTFMFWKKPRKLHRISSLRPSGL

SEQ ID NO: 218 - protein, 324 aa, Caenorhabditis elegans
MSEVVDFEVPWHLIYHYYISGTIAICLNLLVIYLILFHSGKLDNFRFYLLAFQIWCTASDVNIAFLFQPIFLFQILAGYGHGWFYDWFDFTSFTCFAIFTLLLSGQIEVLTICFFRKHHAIMKLRPTTDKVPYPIIYVLCMCYSIVITLSCYSIRISKEEQWQLIQLNYPSMVPQFQRLREFSIVRMTYELITLLVLNAVGTFKTTLVISVLVFRMYNVLFLMQSQLSRTTLAKHKIALKCLVLQFMTTPISFLPAFVLLLNVAFPTPYSQEISNFSLMVATTHSTANCLVVMTTYPEFRKTVMFWKKSRGSRVSISSLRPSNL

SEQ ID NO: 219 - protein, 327 aa, Caenorhabditis elegans
MSVDFDVPLWLYIYYQFIGTVSLFLNLFTMLLILFKSEKIDVFRKSLLVFQATCTVTDIHFTFLMQPLPLIPIMAGYCVGFLARCFDVWTHYLIAFVVGTIVAQLESLTFCFVKKHQTIANITKRHVISKSVNDAVTWFMPFFPVFGYLAFCSAGMKREEQMDYVKLHHPEYALEFSNLPNFAIYELNFWLYLVICFGSLGAIFCGAVFTFTTVDMFKMLKRSRRKISVSNFKKQRSTIKSLLAQFAASSLLLIPLLCFSLVLLLKFDGSQEISNIILTVFSTRSSVNAAVLIATTPPFRNFVLRKNSTNNFAIATVAISMSRTSFT

SEQ ID NO: 220 - protein, 325 aa, Caenorhabditis elegans
MDLSTPIWYITFFYVIGIFSFVLNIAVILLVIYKSENIDNYKYFILMFQVSCMLADFHLSLLVQPMYLFRFMTYSCVGIAAPYIWASYLMIISHLILGVQYVLLFLCFARRHQAIAKIKQQHVIPNFLLYSFIAFVLACPVAACICYFHAGVEREKVEEFIDQMYPDYKTELLSLQNYVIYRDYNVYMTFFVIFKMVATFLVFSMIALATLDMKKMLNEVRRSISNQNYNRHKTAINSLLAQFAAVLVLLLPGLALYPIRLYPYETGMWIVNITWCIFQSRSSINSLVLLATTPPYRNFLLRNVLKSRTKPSTVVVSMAPRTVNN

SEQ ID NO: 221 - protein, 325 aa, Caenorhabditis elegans
MDLGTPTWYITYFYVIGVFSFALNLAVILLVIYKSESIDNFKYYILAFQVFCMLADFHISLLVQPMYLFQFMTYSCVGPAATYMWANYLLITTHLLLGIQYVLLFLCFARRHQAIAKIKQHHVIPEILFNSFIAFELACPVAACICYFYTGVEQEKVEGFIDQMYPDHKTELLSLQNYVIYRENTVYMIFFVIFKMLAGSLVFLLIALATLDMQKMLSPVRRKLSIQNYNHHKKVINSLLAQFAAVLVLLLPGLAFYTTRLYPYETGKWIVNITWCIFQSRSSINSLVLLASTPPYRNFLMRRLAGKREKVSTVVVSVHTRTGMN

SEQ ID NO: 222 - protein, 343 aa, Caenorhabditis elegans
MLFDLSSLQNGYYENLKGPVDFTIPIWYAPYFNSIGFISLVLSNTAALLIIFKSEKLDNFKYFLFSLQVSSLVMDFHLSILCQPIYFLSAYTVNCIGVAAPVIWCNSLMALEQSFNCVQYLCLLFCFMRRHQSVANITSRHVIPARMFQFLMFLAFSFPPFAAFFWYHAGISEDLLPGFIDRVFPEYKSKFSSLHNFTIYQLNFSLGVVGVMGFTGIFVVFQAIAMTTMDTMKMLKGARKTISAQSYDRQRSAMKSLIAQFLASCLLVLPAASFYVISVYPINYGQEIVNISMAIFATRSSVNAVILVATTPPYRAFLFGRIASSRQKAASTVVVSMNTAIGS

SEQ ID NO: 223 - protein, 325 aa, Caenorhabditis elegans
MSLDFSSPNWLILYFNIVSFISFFLNCTTILLIIFKSYKFNNFRFFVLVFQVTCTITDLHINFIMQPVPMLPVWACRFEGVGLKFLGIWPNYLMAAMFTLVGFQFNSLGLCFLKKHQIIKNTLRRNSIPNWAYIAFIISTLPLVALIFISVLQIGVSKEKSIEFSRTNYPQYGVLFSKISNLMFFDSNLWAVGVLFISGFGGCLLGAIVSMTTLDMFKMLGELRRRVSFKNYARHRSVVRSLLAQCAATAILLLPGAAIFAIFLYPDEKSREISQIIVCIYALRSSASSVILVITTPPYRTFIIRKFASKLGVKASPAMGSTSIM

SEQ ID NO: 224 - protein, 322 aa, Caenorhabditis elegans
MLIDFTVTFWLRIYCYIVAIASFPINFGTIMLITYKSDKIDNFKYFMLWFQITNSITDLYMAIFAQPMSLLPIWAVHCVGFAATYLNIWSNYLFSLLPALVAVQFVSLGLAFLKKHQSIASIARKHLISELGHNIFRACVTIWPIFTFSLFCAAAVNREEQMDYVREHYPGYASEFAQLKNFAIYRMNIWMTISAILFIWAFIVFGSITFYTTFDMFQMLNGVQKKISIRNYNREKAVVRSLVAQLIASTIIAVPGFAFLACAFWATGDLRTIIEIIIVLFLLRGSIHSVILIATTSPYKKYILRKIPRKMPPTSSIIVSLT

SEQ ID NO: 225 - protein, 335 aa, Caenorhabditis elegans
MLDINFSLPYWLSVYFHIIGSISLIADIFSIYLILFKSEKIDNFRYFLLNFRISCILTDFHLTFLIQPVPFYPILAGSIMGFGIRLGATLHFGITGFAFLLTYQIGSMIICFVRKHQTIAKTLQQYRIPRWGLILMMTYFLTFTMGVTGFLSVLSVPEDLKFDFVEMNYPDLLPQFQKLPNFSIYEFSSKFLALIIFSILGGFLSFTVFILVLVNILRMLTILKLKISSSNYQKHRAAIRSLSAQFVTSAVIFVPPIVCVVVIMVGLNGSQLIVEVFLMVACLHSTLNVIVLIVTCPPYRRFLIQLVQRKNSPKSKGARSVLVRNSAIAISNFNK

SEQ ID NO: 226 - protein, 330 aa, Caenorhabditis elegans
MVDFSVPFWLIYYLHGIGTISLLFDAFSVYLVMFKSSQIDNFRFFLLNFQIACSVTDFHITFLMQPVPLYPLMGGYALGFLPMKFGVSLHSCLTAVVFLYIYQVASMIVCFVRKNQSIAGTLTSFAIPALLIIFLVGFLAVYTFSVVGMYFCSGITENEKMKFVEENLPEYLSSFQSLPNFSIYQANALLFIMVITAVIGGLLAFSFFMAVLYNIFRMLSFMKVQMSDTTYKRHRAAVWSLIAQFATSIICFLPPISLVFVVFLKLPNPQVIVELLLVVACLHSPANVTVLMFTFPPYRKFVCVTIFRQKPTGLEPISAKSSVMVSHLAK

SEQ ID NO: 227 - protein, 334 aa, Caenorhabditis elegans
MFDIDFSIPYWLTTYYHVIGVISILFDSFSIYLVLFRSDKIDNFRYFLLYFQLACTSTDIILTFLMQPVELYPILAGYSMGFLAQFGVTTHFCLTMLMLSEIYQIESMIFCFLRKHQTIASTLRKYAIPNWLVWSFFAFLAFHICAMGALFSQTSIDPEQQMEYVRMNFPEYLQGFQSLPNFSIYEADAYFLGTVIFAVSCGIFAFLVLCIVIANIFRMLSLLKTQISASNYQKHRAAVWSLLAQFATSGVCFIPPLALVFVALFSINRGQCRFISVIVEYLLVIACSHSSLNVLVLIATFPPYRKYVLSLVKRKKKIARTGLSVLSLKPSQMS

SEQ ID NO: 228 - protein, 334 aa, Caenorhabditis elegans
MYDIDFSTPHWLITYYHVIGVISLIFDSFSIYLILFKSSKIDNFRYFLLNFQLACTLTDIHLTFFMQPVPLYPLVSGYTLGFLSMFGVTTHFCMTALMACLIYQIESMVFCFVRKHQTIAKTLKKYVMPSWLVWGIFAFFTFGICLTVILFSQTSIDPDLQMEYVRVKFPEYLSGFQSLPNFSIYEADAYFLVALLLTTTGGILSLLILCIVLTNIFLMLALLKTQISASNYRKHRAAIWSLLAQFATSSVLFFSPIVFVFVVLIGINGAQAIVEVLLVIGCLHSCLNVTVLILTFPPYRKHVCSLIKREKSFAKTRVMVLPSNPSAMVISHLS

SEQ ID NO: 229 - protein, 327 aa, Caenorhabditis elegans
MYNIDFTEPHWLINSYHAVGLFSLVFNLLAIYLLFFEINDLGTFRYNLLIFQMASLLTDLSITTLSTIVPLYPLNAVTTFGILSTWFGVSSHFCFVFSGGCSHLENVTLLLCFFKKHQAIATIIDVHVVPKFLGFACYLLVLVLASIPLVGLSLLSVSRDEQLIYINMTSPEYYSSFASLEQFAVWRESWALLGVYIIALCEMSTLAGLLVFFNLDLVRMMVKLRSKVSNLNFQKHREAIQSLFIQTLVSLICSTSPCILGFSVMTKMENAQIISELCLLGFACHSPVNVISLLIFSPPYRRFLEKLFRRGNRQLIVHPHSQSGVNQ

SEQ ID NO: 230 - protein, 325 aa, Caenorhabditis elegans
MYNIDFSEPLWIVNYYHFIGISSLLGNIFGIYLLIFQTKELGEFRYYLLLFQVVCTATDLNLTTFMKFLPYYPINALGTIGYFSQWFNMPTHYCMLVSLTFIYYESECLALCFFQKHQKIASVIDVHVIPRYAIIIGSLIFLAFPVYPIIAMQILDVGQEKQLEYIKENLFDYYAGFSTVPHFAIYVDSPLLYSVYSVVLLTMGAIFGCLVLVNTDLIRLMVRLKPQISQQNYQKHAEAIQSLIVQMFVAGLCALPLFGVAFVLAFQMENGQLIGKLMFVCCTCHSTINMISLFIFFPPYRRYLLKKFGIKRRSLFQVGASSVLS

SEQ ID NO: 231 - protein, 313 aa, Caenorhabditis elegans
MYEIDFSEPQWLLNYYHIIGSISLLLNLFGIYLLLFKSNQLDSFKYYLLVFQLACTLTDIYLTFLMQAVTLFPTFAGYTVGILSTWFDVSSSTCVVTTAFIALIQLESLMVCFYKKHQAIATILEIHVLPDIILYTCYFLCVFCPLIFCGVVNYLNLDREQSLVFIKQNYPEHYINFSKLSHFALYVSSPVIYVVFGMAIFGGLLFFVLLLMFTIDIFSMMTNLKQKISKSTYEKHQDALRSLMVQFVTAMLCLAPPIFLTLVLIFEVPHVNVIGEILIAWFASHSSINMISLLIFFPPYRKLFVTFLKRKSA

SEQ ID NO: 232 - protein, 324 aa, Caenorhabditis elegans
MEDIDFSDPRWLLNYFHLIGLVSFILNSIGIYFLIFNTNRLGNFKYYLLLFQLSCVLTDIDLTILVQPIPLFPLFAGHVYGVLFTWFNMQANTSAVTVAFVAVIQLESLIVCFVKKHQGVAILLNKHILSKCVINALYVLCLIFPFFVCAGANSISLSREDALIYIKKVYPKGYLQFSNLPNFVVYMKSQNTIIFLVTLFFAASFGFLCLCFTIYDIIRMMADLKLRISKVAYEKHSEALRSVIIQFITAVLCMAGPMIQVLILVFEIPQMNFISELIFAWFATHSSINMVSLFIFFPPYRKIIAKGLKKTKVNINLPISSMGL

SEQ ID NO: 233 - protein, 371 aa, Caenorhabditis elegans
MATPTEIAYNRAALIESLQFTFVMDEVGKHLSEVICGFGIVLNLLLIYVIFKRTPKHMRSYAVLLFNFAIFDLLTCVASLLACQKTIFSGLSLTYIFHGPCKYVSSSLCFFCHCFVCHAMAHSQWILLISFIYRYRVLVDGAPDTKKMIVIVSLFYAMSAVIFLFYFWDIGDTNDLKQIMYDLHPQYHYDDREIWGDIVVSGNTTVLTIPSLIAIFYMTMPCVPIYFIIHYFRDKTLSTLASNALSMSPATKASHQKLIMALSIQAAIPIFWLVASGIFTLAEFGIIDGPIPENITFRLMDCIPSSSPLVAFIFIAPYREGLLRIISKTGIYRKQENRVSSVVEKFNQPPKQPTNPAQQSANNDAAKTEKV

SEQ ID NO: 234 - protein, 344 aa, Caenorhabditis elegans
MNATNLQLISHAQKIDHVFKIIGYIVNPLGILFNTLLIILISTKTPKLLQSYSMLHLNFALCDLFSCLAGMLALQKIVFSGWSLTYIFHGACGQISSYFCYFLHVFVCHCLAHSQWILMISFLYRYYILDQISPDTVKIVRICILTYLPSLLFVIVYWSDVANEDALKRIVNSFHPEYIYDSKEIWGDLVIAGNMSCWSAATFSAIVYMTIPCFPIYGVIVFFRHKTLKSLDGRGRITMSETTRSSHKQLIKALTIQAIVPIFWLTASTFYLLALFQVVGRVIVENMPFRIMECMPMITPLISLYFVRPYRSALTGWFFPTSLLKPVIASAMLSSTAASVAPTP

SEQ ID NO: 235 - protein, 326 aa, Caenorhabditis elegans
MSLVFVIFHSVLSAIGCVLNSMLCHVAAWKSPTVIKTYSIITVNFAITNLTICGVNFILQMRMVPIEKTMIFVSYGPCQWLTDRTCFNLYSVLVHVYTHTIWLLLISFCYRYYVMIRSEPSKRQVELLLLIIYLPSFIQMILLFFDFTDPLILLDIQQNLVPQYNFTDLMIFGVADSTSFNAMYSIVHVAVMSTPIVLCIVVLRKKILRKMEFKGVQVNANTRSLQLQLLRALTFQAVIPGFYLIGVASYFVSRLEIYRDPFFEYLIFSAFLFVPVLTPISSFIFVTPYRKWFLKTCHWRNYRVESENYDTKEDTHETRGHTVSVR

SEQ ID NO: 236 - protein, 341 aa, Caenorhabditis elegans
MIEVIVLMIYYAILGAFGIVLNGLLLLLAIFRSPSQIKTYRILIINFALTDMFSSFLMMFCAPRIIPLDYAMAHIFYGLCHFGHPFLCYASWSALLHLFIHSMWSLLLSFAYRNYILSSAPPSTWKVFMFSVFIYIPSFTQFIVLMFTAADPYLIFGMLKSKFPDYTFEISTVTGISDALSPAATFSILNMTVPVFAIYTAILVFRRKILCRLGKNTENLRSETKSIHKQLLRALTLQACLPVLFVGGVFCFFIQAIRLITHPIFECLICAIPAPIPLLSSIISLYHIRPYRREILRIFTRVTIPIPQIEPASSAVALAAKHKISVLSMGRLHRLSVPNNS

SEQ ID NO: 237 - protein, 320 aa, Caenorhabditis elegans
MWLDTLYWSVIGVIDVLAILFNAFLIYLALYRTPKMVRVYTTLIINLAFTDCCSAFLNFFVQQRMIPTAFTIGYISNGFCKYFGYRVCFFSHNLMAHFIVHSNYSLVLSFAYRYYILRKPEPQRKTVLIVLFLTYLPSFLQLILYQFAESEPLAIIALLQPYHPKYNFTGLTVSGVADIRSVYALYKILQMTVMTIPIFSTILYLRKKIIDKLLYRGVNISLNTKSLHSQLLMALTYQALLPTLYSINVVMYVLEQSGIYASPFFENFIMSGLVLIPFFSPFTSFFFFSPYKRIVLRILIRKLNKRQVAMSETGPGSFPI

SEQ ID NO: 238 - protein, 337 aa, Caenorhabditis elegans
MLDSITLFFLSFHTFAGVSGCILNSIVLFLALFRTPKTIAAYTTILINFALTDFLACFTDLFIQMRHIPAGFTMAYLSRGLCTYFGPHVCYFIYSINISLVAHGLWSLLMGFSYRYYILFHPAPTRKALIVILMFISIPSIIQMITFLWADDDADEMKRIVVERFPEYQLQNETICGTINIIEFSAMFTILHMTCPITPVYITIWILRKKIIENLTSNSKDMSSKTKEMHKQLLKALTWQAMIPGFYGMSIVSYVIGQFFFNHPVFEYLTLTGFLFMPVLSPLSCLIFIQIYQKRVLSWWYKMIGNPIPDEWLTVLNATRTNATSSVAPSNEIKSKH

SEQ ID NO: 239 - protein, 325 aa, Caenorhabditis elegans
MFDFAVLFSCAHAIISVLGMCFNALLAYLALFQTPRVIKSYATLIVNFAITDFFACMFDFFVQQRLIPTGMTLAYVSNGFCKHWGPRTCFFGYSLMLHFLSHSLWSLLLSFSYRCYILYKPAPHRHTLVILLMIIYIPSLFQWISFIWSQDDPEEIREILHVAFPAYNLTGHVVTGTKNILCFSALYTILHMTIPITPVYVCILILRRKIISRLSYQGVNITSDTKNLHSQLLMALTYQAAIPGFYLFSIYSYAIGQFGIYNHPALEYFTFSSFLLIPFLSPLASFIFVTPYRQFIKLKLFRIVQIEPTETSNTPQNYTSIHIIG

SEQ ID NO: 240 - protein, 325 aa, Caenorhabditis elegans
MIDFSVVFSYAHGVIAICGMLFNALLTYLALFQTPRVIKSYATLIVNFAITDFCACLFDFFVQQRLIPSDLSLAYISNGFCHHFGPTTCYVGYSLMLHCFSHSLWSLLLSFSYRCYILYKPAPTRPVLVLIIFLIYTPSLLQFVSFLWAQDDPDEMREILTKHFPAYNLTEHTVYGTKNIICFSALFTILHMTLPITPVYICILILRRKITSRLSVNGVNITKETRNMHSQLLMALTYQAAIPGFYLFGVTSYAIGQFGIYNHPALEYFTFSSFLLIPLLSPLASFIFVTPYRRFIMHYFFKTTRVEPGESSLTRNIYTSNAYTG

SEQ ID NO: 241 - protein, 337 aa, Caenorhabditis elegans
MAQEIALSIFVKSWHIFFGITGVILNLVLILLVVFKSPNAIRVYSRLITNFAVTDFLACLLDIFIEIRVLPSPNEATITYILNGFCTYFGLSTCAIGLSMYIHTLTHSLWSLFISFVFRYLILYKVSLKEKHILLALFVFYIPSFVQAATYWTSFVDSSTILPITKRIYPQYNFELETGLITGITNLFSVSAIYAVLHMTIPVTPVYITIFILRRKILKTLMMSYNVMSKETKAIHAQLMKALTFQAFIPVAAWAAVYVYIGMQFGIISGIFFEYMVFSTVIFMPLLSPVAYLVYVRPYRLYILRTFCRKCSQSAVESKIRTGFHTQYDHSTVGRSA

SEQ ID NO: 242 - protein, 340 aa, Caenorhabditis elegans
MITDSELTSYFRILHAIFGGTGCILNAVLILLVIFETPKHIRLYSILILNFAIFDLAACILDIFIEIRVLPYPNEDSMAHIMNGVCKHFGLTACAVGFSLYLHTLTHSIWSLLISFAYRYLILFKTTFKRNNILLVILAFYFPSFLQAVTYWTNFVERFEILPILMRVHPDYDFSDSSILITGITNLYTPSVVYGMLHTTLPVTPIYIAIFITRWKIIKVLKKNQSSMSKGTRAQHDQLLKILTIQAILPSTSFFTSWLFMGLRFGLFQGQVYEHLVFSCAIFMPVISPIIYIVFIKPYREFFVRSFCKKCFKNVVQDRTQTQMYSNPDQSTSGNRQLNR

SEQ ID NO: 243 - protein, 339 aa, Caenorhabditis elegans
MHAFFEIWHCIWALLGCSFNLMLIYMAIYKSPKTIRSYATLIINFAVTDFFECALDLFIQIRLMPAPGDVTVIYILNGSCKYISQFACKIGLSLFLPCITHSVWSLLLSFGYRYYILHYSALTRLKLVKIVLLILIPSLFQGLTFWTSFAPLEIILPLAKKWFPQYNFEAETGVLTGIVDITHWAATYAVFNICLPIFPIYIAIFILRQKIITFLGAKTQSMSPDTKAAHSQLLKALTIQAFIPIFMGIGVIFYLIAQSGLIVSPIVENAIFSIAILMPALSPLTYFYFVRPYRQFLKRIFKNPFKVSAAYVQRTGSSSAMFQSGGHPSQIGTQATTVL

SEQ ID NO: 244 - protein, 337 aa, Caenorhabditis elegans
MIIFFEIWHWSWALLGCYLNLLLAYLAIFKSPKAIKSYATLIINYAATDFVECALDSFLQTRLLAVPGEAELVYIFNGPCKYIGSISCKVGLSFFLHCLTHSVWSLLLSFGYRFYILHNPSLSRLVLLKLILVFYIPSLIQALTYWTIFASREEILPLARQWFPYYDLDAETGVLTGIIDLTNFVAIYSIGHICLPFFPVYITIFILRQKIINQLHVKQHVMSPDTKAAHSQLLKALTIQAFIPIFVGIAVTFYFLSQSGLVRSPILEYSIYAVAILAPALSPITYLYFVRPYRQNVKRFIANPFKILLNTNTGSSIGVFHSGGRPSNFATTLNTSR

SEQ ID NO: 245 - protein, 339 aa, Caenorhabditis elegans
MIIFFEIWHWSWALLGCYLNLLLTYLAIFRSPKAIKSYATLIINFAATDFVECALDLFIQTRLVAVPGEAKLVYIFNGPCKYTGSLSCKVGLSFLLHCLTHSVWSLLISFGYRFYILHNPALSRLTLLKITIMFYIPSLVQALTYWTLFVPREKILPLAKQWFPYYDLETETGVLTGVIDLTNFVAVYAVAHICLPFFPVYITIFVLRQKIMKYLGGQSQMMSQDTKAAHTQLLRALTTQAIIPMFLGIAVLLYFSSQSGLLKSPILEYSIFSVAILMPALSPITYLYFVRPYRQKVKRIIRHPFKLLSRPHERATSNSGVFYSGDHPTHFSKPVIAVH

SEQ ID NO: 246 - protein, 339 aa, Caenorhabditis elegans
MIIFFEIWHWAWALLGCYLNVLLAYLAIFKSPKAIKSYATLIINFAATDFVECALDSFLQTRLMAVPGEAKLIYIFNGPCKYTGSLSCEVGFSFLLHCLTHSVWSLLISFGYRFYILHNPALSRLTLLKISIMFYILSLVQALTYWTLFVPRKEIILHAKQWFPYYDLETETGILTGVIDLTNFLAVYAVAHSCLPFFPVYITIFFLRKRIIKYLSSQSQMMSPDTKAAHSQLLSALTAQAIIPMFLGIAVLLYFASQSGLFTSPILEYSIFAISILMPALSPITYLYFVRPYRRKVKSIIRNPFKILSRPHERATSNSGVFYSRDHPIHFSKSVITVH

SEQ ID NO: 247 - protein, 323 aa, Caenorhabditis elegans
MYFGTYQIIHAILSIFGVGINIFLLFLALTKSPKIMRPCSALITNKSLTDIMSSVANFFVMQRILTDGSSVTIIPTGPCTMIGPTACYAGHMFMGSFLEHNLIWLIACYLFRYYILYVCDPSIKSIIFAAFLVYTPSFVHMAMWIKLFDAEQMEIKMNETELFANELEFPEMQLTGRIVYWSSIVVYVQLVFTALLVVIAYTWIRNVLINFLISMGVSLSKDVKIINRQLVKILTFQVCIPIWIFLGVFFFLAMYTQSTRPDTLQYAITISFMLAPVVSPFAYIFFVPHYWNFCIGKKYVAPANSSICGTSATCGSVEKKSVA

SEQ ID NO: 248 - protein, 317 aa, Caenorhabditis elegans
MLYQLLHTVLSVTGVTLNAFMMYLALTKSPKIMRPCSAIITIKTFTDILTSAMSFFVMQRIVTDGSSILVIPTGPCTRLGPTACYVGHMFMLCFLECNLIWMISSYIFRYYILYVRDPSIKSLVFVALCLSIPSFIHMAAWIRSYDPNEAFVVPDSFGLASSHLILGGHIVYRSTITLILQLFITSVLVLIAYAWIRNTLLSFAIKMGSDKNDVKNLNARLVKVINFQVFLPTFIFLGFFIFAAMFGRYITVNIAQYLVSIAFMFSPICSPFSYILFVPHYLNVITGNKKPAENRATDMCAVRAFKNPNVSVTMTNA

SEQ ID NO: 249 - protein, 320 aa, Caenorhabditis elegans
MLYQLLHTVLSVVGVSLNAFMMYLALTKSPKIMLPCSAIITIKTFTDILTSAMSFFVMQRIVTDGSSIHVIPTGPCTHLGPTACYIGHMFMLCFLECNLIWMISSYIFRYYILYVRDPSIKSLVFVAICLSIPSFIHMATWISNYDPAVAIAIPENVGIEARDMVLGGKIVTWSALTLIIQLFITSILVLIAYAWIRNTLLSFAVKMGSDKNDVKKLNTRLVKVINFQVFLPSFIFLGVFVFVGMFTQLIDPKISQYLVSVFFMFSPICSPFSYILFVPHYLNVILGNKKVSEAKSTTEGCTFRHVNMAASTSNTPECSA

SEQ ID NO: 250 - protein, 324 aa, Caenorhabditis elegans
MIYQIIHSVLSTVGVSLNAFMMYLALTKSPKIMRPCSAIITIKTGTDILASIMSFFVMQRVITDGSSIIVIPTGPCTNFGKTACYVGHMLMLCFLEYNLIWMISSYIFRYYILYVRDPPIKHLVFVAFCLSIPSMVHMAAWFSFYDSNETTEDLSSYGIGSGEMALGGEVVYWSAITLITQLFITAFLVVVAYIWIRETLCSFAVKMGSVKKDVKNLNKRLVKVINFQVFLPSFIFLGVITFASMFTSKISYEYAQYAISVIFMFSPICSPFSYILFVPHYRNVIIGKKKQPKPHPEMCGPIRSNTRTTSISVTNNSSHLSSAH

SEQ ID NO: 251 - protein, 339 aa, Caenorhabditis elegans
MFVDIYDQLYISYAAVVSTLGIIFNGFLLFLIFFKSPSCLTPYTVFLANTSITQLGYCICFLLTVPRVISINLRIVNIYLGFSQFLGHWWSYMIFTTMLHFAVNSFLSIMLSMVFRCISLKTLRFPTSGAFAMCILAYMIPLSMVVSIRGIEITSNFTINSKYTLWQLENLDKYRTVVGTTMAQLSTLWVACCVSILCIPIYSVMFWCRYRILRMLERPGYMFNTTTTLQIKRLVKALTVQSLIPVFTLFPASLIFLSTQFHVIETTKFGYIIISLLSLSPTIDPLVTIYYVQPYRKYIVDLLWSEERPMVSPFLSNNDPRFYRSRSNSVLMMRNTHFV

SEQ ID NO: 252 - protein, 342 aa, Caenorhabditis elegans
MPILRSVAAVLAPFTSDTYMNTADSIFVITVTILTSIGFLLNLLLLYLIIWKSPRNLTPYRIFLANTTITQLVYALFAVTSMPRVLAKHQYTIVIYLGPVQFFGEWFSYMSYVGILHLSLNSFISLMLSMIYRYFSIRFKRFTANTSIILCIIGYFFPFLIFASCSNIAISSSLSFNTAVLDGMVENLESYHMVLTTEISNHPSLIILTLAVTCGLVPIYFVMYWCRHQIHKTLKQTRSVHSPSTRDNARRLVRALTIQSIIPLVSVFPASIFWCLSQLGFVEPTMYSYFIIPCLSLGCIADPVVTIRCVLPYRRWILKLCNMSTTDMITSNQDKSTIFQKH

SEQ ID NO: 253 - protein, 320 aa, Caenorhabditis elegans
MISAEDYIFLSSIFYPVSSTLAVSVQFFLLYLIVKHSPKHLNFLRATLALTSVFQIILIIVTYFTQVRYQTTKTPIEIWTYGYCRFFEPWICNCFYQIMQLSVLASHLTIYGTFFLKYRMVTKLQMSQVEIMKTYVVFYFPLILSTIFVVIIFKTQVWTVQAEEELRVVNIDGNNSRMYLIFAILNYSHWPNTSNLVIYGACLLASPVICFFYRKNTLKHIKNQAGNMSIACQEQYRSFILGLTIQCILPCVIFIPLEFLYYYCIITKNELLFVEFFFPVIVELPAMIDPFISIYFVTPYRKLIIKWVRKRKTLHRTDTF

SEQ ID NO: 254 - protein, 324 aa, Caenorhabditis elegans
MLTNEDYLSFLSLFNPVFFCTSVILQTIWLLFIIFHSAKMGIFRFIIAHTSVCNIACLCLVVLFQFRQVSSNVPVEVRSYGPLRILSTLTMYTCHQIFQLTILLSGISLIVTLYFKLMTLRWTKVSSITMILTFLAFHIPFFLSTGFVIYLILTVAYPQEIQEELALKNANATEYSIVGLMKLQTVSLMQFALVVGGVVLSPFICFGIRARILNLLNKHLDASSRTKTQHKSFVLGLTIQSAIPTFTYFPMYCMYFYCVTTKTEILFQQYFIYLASALPVFIEPIVTLYFVIPYRKKLLSCLGKRDNSVGTTISVSSGITRSRI

SEQ ID NO: 255 - protein, 274 aa, Caenorhabditis elegans
MGADIYRDVLYIFYPIFFIFSTITQLMLIYLIFYHSPTHLKMLKVFLLNTSLFQIILVVVSCSSQFRMITTAIPIELRSYGLLRYLEAWLGYTMYQVLQVMEVIMVINQSLPNEIREQYKFLNANAEEYSIVGALSLKTVPSLINFLLISGSVVASPFISFFFREKILRRINSQFYQHSKWKKSQIQVFVKGLTIQAFLPLIFYVPVFGLYFYCILTHTEILFQQYFMTVVPCLPAFFDPMLTLYFVTPYRRRLKIWMRIEKESKVLPVTSLVK

SEQ ID NO: 256 - protein, 324 aa, Caenorhabditis elegans
MPSSEDYRQFLEVFYPFFLITSLISQLFVIYFILNYTPKQLQTLRYILVNTCVFQVIHVSACYLMQFRQVSNLVPMEVWSYGYGRHFEAFVGYSLYHVVQTSTVASGISVVMTLFLKYEAARNVKLTSWKRYLIITCILLPLVTSVTLEIILIITQSLPNEIRERYKLINVDVKDHSVVGTLNFKVLASQVNVCIMSSSVVMLPIIGLSSRRKLLEHIQKTSDRVSQTKNSQNKMFVKGVILQTFLPLCFYCPISSIYFYCIVTHEEILFQQYFMFLIPAFPALFDPYITLYFITPYRNRVKIWLRMNKVSPKSVTLINVNCNY

SEQ ID NO: 257 - protein, 320 aa, Caenorhabditis elegans
MFRAILSVFNPLVYVLSVCFQTTLIYTIIRHSPKNLSTLKIILLINCFSQSIQSSMAFITQIRYVSNLVPLQLWSYGPCRHFEAFICYSMMHVLQTSSLISGWTVFLTTFMKYQAAKHVVLPKKNIWIVICVIFAIISVSVACEIYLIIIQALPQDIRKSYESINKNLEEYSVIGIMNYSFLPSSINGVIVNGLVVVVPISCLTLRRKIFKLLSGPNKSSDTLYLQNRIFLQGLTFQIFGHILVYVPIYICTFISFITKTEYTFSQFFIFVLPSLTTVVDPVITMYFVTPYRKKLLCWMRSAQNKVFSASGSTFAVSIIN

SEQ ID NO: 258 - protein, 320 aa, Caenorhabditis elegans
MYREILTVFDPLVFIVSLCFQSTLIYTIIRHSPKNISTLKSILLINSCFQLVQSSMAFFSQVRYVSNLVPLELWSYGPCRHFEAFICYSTFHVLQTSSLISALTVFLTTFMKYQAAKHVHLSEKKTWVVVCTILAIILVSTGCAISLVIMQALPLEIRQKYILINQSLDEYSVIGIVDYSVLPSRINATIVNGLVIILPITCLLLRRKILKLLTGPDRSSDALHSQNRIFIQGLTLQIFCHTLVYVPIFVCSSISLVTKTEYIFPQYFIFVLPHLTTVIDPAVTMYFVTPYRKKLIIWLRLKNNKMHSIAHSTFVVSVNQ

SEQ ID NO: 259 - protein, 316 aa, Caenorhabditis elegans
MYRTVLSVFYPMFFILVIPSLILLIFIILRYSPDCFQTFKYILLVTCISQIVAVTTNCLIQIRQVSNLTPMEIWCYGPLRHFTALIAYSTYFLTQTAVVISNVLIFLTIYLKYLATKINTRKTCNYGVTFFILSPIFIALGAQTSLILTEGIPSENQDHLEKINFDISDHAVIGYIRLKTLPSIIITFVITGTILILPAVGLLLRKKTLRNINSNKFSITKKALIKGFINGVTLQVFLPLICYIPVFGSFLVLAETKTEVPFEQYFFSVLVMLPMLFDPYIILYSVAPYRKQIEKWIKTKRRQSILIVDPAARIGF

SEQ ID NO: 260 - protein, 337 aa, Caenorhabditis elegans
MKEVDILAFINVAYPIFAISVLFSQALLLLLIFKNQTKLLRTMRIYLLNICAAQVVTIISGFLTQCRMIPNQTTVAFVCTGVCIRVGRRSCFLLHLLRDASSMVALFAIVHVFYYRYKILSHQKLSSVQIMRNFIIVHLPAIFCAICQFINPSQHNAIVLETRALHPSYIFEQNSIFGFSALTSPAVKASTIIFTIVLVLNPLAAIIYRNKIWGLLNEYEEYKSPRIKHAKSMITGLTIQTLIPSICFVPLVVQFFLTQYSEAGVLILEYFNSFLVILPTLIDPILSIVFVIPFRRMFFKYLLAVRQCRFSLSKLSDNDIMSKGNGYSAVRAVSRKT

SEQ ID NO: 261 - protein, 326 aa, Caenorhabditis elegans
MMSAMETNMVLILTIFYNAYFLLAISSQLLLLYLMLKCQNRSLHEMRIYLFNILGLQFISTFSAFVLQCRIVPSSGTVAMLCYGPCKYLGNIVCEVLFHILQTSLIACATALIIAFYYRYEMLTNNSFTRSGHYKQLVISYCVPLVFLICEVLSPNDVNKLVAELTVLHPTYGLENYAILGFSDVKTVAASSQTLMLMIGLYGTPFIALVFRKKIIKILHSSRSYHAEKIVQTKSMIQGLTLQTLLPLICYCPGFTYYIYSQYTQSSSLFVEFAVSPYGFVYTIFDPLLTIYYVLPYRRTFKAIFSKHNSTTSATFVHSETARRVA

SEQ ID NO: 262 - protein, 336 aa, Caenorhabditis elegans
MSEVEKKLEMFVTVYYSLNVTLALSINILLLFIMKTTKSSLLKDMQYYLFNTALFEIIVSLSTYFAQCRPVANKSTLAVFCHGPCKYFGKNTCFVTFAVVQCSVVAASFSILLSFYYRYRLLKVNFKKKHKHATTFIIFSFFPTVMLLFQLLTDSNFAIVEAETREMHPDYDYVNNALIGFSDSKSPAAIIAQSLISLGVYMSPLIAFHYRRKINKILSTNTGQRIPVAYCKQLINGLLIQTLIPFCVYIPPYSYFLYSQLSGHSNLYFEYLLNIFGSFTAFINPLLTFYFVLPYRRALCKKVFKYFPSISEEGTEITTFPTTVQFQRGHTASTKF

SEQ ID NO: 263 - protein, 336 aa, Caenorhabditis elegans
MDLFGSSSNRFVPIINIYFHFYLVSGLFFQCILMILIIRKSPNSLNDLKLFLYNTAFCQIANILSAYFIQYRALPNTTTLAVLANGLCRKFGPEVCFGTYHVYLGISSSVALSISTTVMFRYSLIKNWRLSRTSLRGLIICGHIAPFIATAIPFTTQWDFDVVRAQSVKEHSTYDLSIYAPFSGFSDTRSFQFLFVTAAIAIGAYFVPLMSVFVIRKIMIVTKAHSKMSENTKRHTRMLMKGLACQVLLPLISYFPIITLYLVTQMTAEEFLITEHLLNIMTCFPALVDPFISFYFIVPYRVALLKLVKKKVDSTIDVTTYIPPPVSFRHSSTIHG

SEQ ID NO: 264 - protein, 334 aa, Caenorhabditis elegans
MTSLSSNRIVPFVDIYFKIYFYGGLTFQLLLLTLILTKSPSILTNLKFFLINTCFLQIILISLGFFTQHRSLPNIDSFAVLPRGPCREFGPDVCFSAYHFFLGVALCVGLGISNTIIFRFQALRKGRVSRSRIFTMISLTYIPSSITIILPFTSSWDFEKVRSLTYIEHPKYDLSIYEPFVGFHNIASFQFTLATLLLVIGAYAIPAISGFLTSRVIHLINDNRGMSLKTKEQSKTLAYGLACQTFLPVICYIPVASCYIFSQMTSVELLLNEHLLGILICFPSFVDPFISFYFIVPYRQALLGLFKCRKTKPLNIVITVRHLSKRNPSIVDSN

SEQ ID NO: 265 - protein, 325 aa, Caenorhabditis elegans
MCSNSNCYVPFFNWYWPFCGVLAIIFQTILLHLISHKSPATLDGLKIFLYNTSCVQIALITFAFLSQHRLLTNSISAAVLSLGPCSYVSPTTCFINYHVFMATSFGAGSAIAITVLFRFFVLVQNQVHTNQTYIMVLASYIAPLVVLIIPFTDKWDFESAQASTALEHPSYNLSIYYPYSGFSNAGSPQFLSATLLLSIGAYGIPIGCLILTRKVLILIRYHSHMSERTKKQAQTLIHGLIVQSMLPFISYIPSFSGYIYTQSTGRELLICEHLILVSSAFPALLDPFISFYFIVPYRQAIIEWVLPKRQQRITTVTSNSTSGFN

SEQ ID NO: 266 - protein, 340 aa, Caenorhabditis elegans
MSKILDDVAAVYYPIYFTSCSILHILLFYLIFNKTSKVLRTMRYFLYPSNFFNYVLAAFTFFLQFRTVHNTRSLAIMCQGPCKYFGAVWCFNGYIFILSVATAGGVLNIHTLYYRMITIKYHDNMKFRIFIFGLWYLFPIAIIVLSYIPPIDLDSVYLETLQAHPDYNFEPYRKFGGFANSHSIFMTLVTFTLVLLTIVAPTLGYSWRRQTLKVLDRNINSLSAQSVTQFRALVHGLGLQIMLPLFCYVPVGFFYIFNKYVGTQILISQYTVCFMITLPALFDPILQIYFIVPYRRAAKRILTCSRSERIENNENSLRRNTVTLWNGRKTSSPNQMQNLT

SEQ ID NO: 267 - protein, 327 aa, Caenorhabditis elegans
MEPLQTISRVYWTIFFSICLCLHSSMFLLIYYRTSRTIRNLRWFLYPSNTASFVLATVAFILQVRNVNNKISMALLCDGICKFIGPWFCYHCYNLLLTMITVTGLINLHTLCYRTMCLKHFETRKSNRASLKFSLHYLIPMTPLILTYFAPINHADVYMETLNLHPNYNFEPYKNFGGFANSHHFCMNFNTAIYAFNTIYFPIIGNYWKRIAMKILKSSISTASSKSTRVMSELLVKGLNLQVLLPLICYVPISILFCWNKYSGQQIEISQYSIAFFGTLPCFFDPLLQIYFILPYRSAVRRLIFCGCSAQTSVANSSPNRGTILSV

SEQ ID NO: 268 - protein, 321 aa, Caenorhabditis elegans
MDFFQYFFRYYWQLVYMICLMLYITMYILIYNFTGKTLQTVKYFLYPSCTAMLIAMTMAFATQTRNIDNTHSMALLCDGFCKYIGPTFCFYCYNLYTAFGIVVNLINLHTMYYRTLCLKYLDAKKVRLWTLVFMWHYLCPLIYLIVIITSPQRHLEVSMETLSLHPNFDYTPYLTFGGFSQAQKELLDKAAMSLSLISMYYPLIGTYWKHKAMKMLKSHMSPNTSDATRAMLQTLIKGLNFQILLPMLRYIPLTAIYFMIKYTGEQFLISQYTITVLGTIPCILDPLVQIYFIRDAIRKFLACNSSPVRRIYDSWASRMII

SEQ ID NO: 269 - protein, 319 aa, Caenorhabditis elegans
MDFLQYFFRFYWPMFSLTCLCLFITLYILIYKFTTSILKTMRFFLYASNTATLISVVLAFATQTRNIDNEHSMGLLCDGFYKYIGPTFCATCYSLWSTCGITMGLINLHTLYYRTICLKSFDPKMIKRRNLLFFWHYLVPLVYLAIKFIPSPDHLAVHNETRTLHPDLDYTPYLNFGGYSQAQKVFLDRSAIVTLIAMSYFPIIGSYWKYQAMKLLTPHMSPNTSETTRDMFRKLIRGLNFQIYLPLLTYVPMVFLFLAIQISGRQFLITLNGTGSCLFDPIVQIYFITPYREAVVRFLECRPVRFRSNVVSWASRVIF

SEQ ID NO: 270 - protein, 325 aa, Caenorhabditis elegans
MDILQYLFRFYWPPFYLLSLCLFSTMYILIYNFTTNVLKAMRYFLYASCTATFVSLTLAFGTQTRNIDNENSMGLLCDGFCKFLGPTFCATCYKAYATSVLTVNLINLHTLYYRTVCLKLINAQEIGRNTLIFSWHYLFIIAYLTSTLIPPSDHLAVYNETLAHYPEYDYTPYLNFGGFSQAQKVYLDNSTVAMFLVTLYFPMIGSYWKHQAMKLLKPHVSPNTSDATRVMFRKMIIGLNFQIFLPMLSYIPVVFLFILIQVTGHQFLISQYTITCLGALPCFLDPIFQIYFITPYRNAVRAFFVRKPSADGSWATRVSAVNSVA

SEQ ID NO: 271 - protein, 323 aa, Caenorhabditis elegans
MDPSYYFFHYYWPIYFLLCSSLFLAMFILIYNFTTPILKPMRFLLYPANAAMTISIPSAFAMQARTLDNEHSQALLCDGFCKYIGPNVCLICHQLWTTFGMTACVINLHTMYYRTICLKYLDPKKARWWTLLYSVHYIFPLGSHILLIFTPSSHEEIHNETLHLHPEYDYTPYLDFGGFDAFQSIYLGRALMMAIATFYSPIIGNYWKHQAMKMLKVHMSPQTSPAARAMIQTLMKGLNFQILLPMISYVPQFLMVLFKKYTGQEFPNKQYLGTVLGALPCLLDPMVQIYFITPYRNSIREFLECKSMPRGSTSGSWASRVIT

SEQ ID NO: 272 - protein, 323 aa, Caenorhabditis elegans
MEFVYYFFHYYWPVFFMSCSSLFLIMFFLIHNFTTPLLKPLRFFLYPANAVMMISITMAFVIQSRTVGNKQSTALLCDGPCKYIGPNFCLHCYHLWRAFGITACVINLHTMYYRTMCLVHLDSKKAHRWTLLYSVHYIFPFSSQILMLTAPSNHAAVHNETLILHPEYDYIPYLDFGGFDPTEVVYQARNWMFTIATFYSPVIGSYWKHQAMKMLKVHMSPQTSPASRVMLRTLMKGLNFQILLPMISYVPQQLAYLYKQVSGQEFPYSQYAGTFLGTLPCLLDPMVQIYFITPYQNAVRRFLECKTLPRGSQATVGRLECDS

SEQ ID NO: 273 - protein, 323 aa, Caenorhabditis elegans
MGLDTIFTVYYAFYFIFSGTAQLFVLYLIVFHSPPSLQDMRKLMMATSLSQVIMCSSAFLTQVRIVPIQFSIALLSFGPCSIVGPQACLATYNLLNTSGCLVVASLLHMMYYRRRLMSSVRRLSTQKFIGNCFVVYFFSAVVLIFSFLGPTNFGYIKALVTTFYPTIDLQNYTLSGFSDVTNILCSTATGIIAAHAYFPPLVAIIWRRKIVREINSQQSALSARTQLQTRHFVQCLTWQTCLPLFFYVVPYTFYLVQQLFGIGTAITEYLIFPLNTFSAVVDPICMLHFIKPYQRKAKQLISNLLGLNIAQNSSTIATVSSQL

SEQ ID NO: 274 - protein, 323 aa, Caenorhabditis elegans; identical to SEQ ID NO: 273

SEQ ID NO: 275 - protein, 323 aa, Caenorhabditis elegans
MDESVAMFVNYYYIAYVIFALPLNFLLIFLIWFKSPVSFSAYRLLLLYTSISETFLIVFSFLLQMRIISAGESVALVPYGPLRHASPVIAFIGYNFYNLFLCTTNLSILLSMYYRYSLICHGKCENLALSRNFGVTLVISVGMLVAILIPPYDFPTVTLNTERSYPNYHLLDTFGEYGGFKSTTRLVYLINTTILMGIPYMMPVFILYWRHQIFNQINEVQTHLSERTKKSSLDLVRALTMQAMFPMVCLLPNVAYFLVAQRIHIEFEIAEFVPFPTCVIPCLIDPILTIYYVAPYRSFVTRRQRSVSIGVTLSVAQSSARTI

SEQ ID NO: 276 - protein, 345 aa, Caenorhabditis elegans
MIYMSWFHTWSPRIFCVLSFIFNILFLVLLKFKSPRYIGGYRYLLMTFGVFNLITSVTEAVVSTAIEGFNNCLIIFVPHGLLFEYPLLAQNLISIRCGMCAYTFALLAVHFLYRYLAVCRPLAIAHFFRPKTIFLNSLFVMCFGSSWMLIGHITMWPDDHIYDLIDEKFIQFHNTSSRDLAMIVANYEYPVYDWSKSGILGMLIATLITTSIMISYVFFAQKIHLSLKACTFSGAVKRLHSSLLKSLIAQTIIPLISTIIPCFVIWFLPLGGDNYGVMLSTYFMPLLSVYPAIDPVVITCSLSDYRNSALKTLGFQREEISTSKQPYSNIFTVIPSLNNNYITPN

SEQ ID NO: 277 - protein, 336 aa, Caenorhabditis elegans
MIYIGFTHFWTPIIFGTLSYFSNSIFIYVVLLNTRANIGAYKYMLVCFGLFDITYSTVDMLVAMGSHSEGNTFCVFVTHGPFSNYLDLGFFAPCVRCMFFSLSYGVLELHFIYRYVALCYPKRLSHFGDPKWILIMISAVFGQGLLWFFSVYFLMWPDSETRSYLVIPFRRDYNADVHKIPLLASTYWGASTQLILRTSTAIIIVTLISCFTICFCIWIGWTIQSKLKVADMSKTTKRMHRNLLKALAIQTFIPFAISYIPCVVAWSVPIIHVDTKSLNNYTSIIAVAAFPFIDPLAIMVFLPEYRKLFTKIFLPFLYNSSTVYPESTVRESSGRG

SEQ ID NO: 278 - protein, 331 aa, Caenorhabditis elegans
MIYINWYQKNMPLIFGISSYIVNPLFIYLVLTKSSKQMGKYRFLLIGFAVFDVFYSIAEMLTPIAVINTGYGFVTFITDGPFSENANYAVSSRCTFISMSYALLIIHFVYRYLILFYPHQVDKMLQPFGILAMIVLTAGHGASWTWLCEGCLSPNEEIRDMIRPAFLEIHHVNSDNISLLTGQYRNASDFVVYKSLFGIMSLTLFSSYCMCVYIILGYKIMKKMNENTNMSSISATLNRQLFKALVAQTCIPMFASFLPTVIAWYAPMFLINVTWWNNYICNVALAAFPLIDPAVVIYFIPNYKNTLLVWFRLKKPTVTAALTSMFSIPTM

SEQ ID NO: 279 - protein, 289 aa, Caenorhabditis elegans
MIYLNWYHKYLPIIFGVLSYIVNPLFIYLVLTKSSKHMGKYRFLLIGFAVFDIFYSIAEMLTPIAVINTGYGFATFITDGFFTENANYAISSRCTFIAISYALLIIHFVYRYFILFHPHLVDKMLQPLGVFAMIALTAAHGASWTWLCDWCLAPNEEIRDIVRPAFKEVHHVNSDNISLLTGQYRNASNFVVYKSWFGILSLTLFSCYCMSVYLVLGYKIMKKMNQNTNMSTISATLNRQLFKALVAQTCIPMFASFLPTVIAWYAPMFLINVTCGTTISAMLLYLLFR

SEQ ID NO: 280 - protein, 350 aa, Caenorhabditis elegans
MIYMNWYHQNVPKILGALSFLVNPIFIYLVVTKTKTQVGSYKNLLIMFSVFDILYSISEILTPLGVQGNKHGFVVFISDGLFFEYPELGQHAMSNRCGFISISYALLIIHFVYRYMALFYPHKLHLFFRPIGILFLTLLMLFHAGSWTMICQNCLAADDEVRKIVRSSFIDQYGEESNGVPMLAALYWGVRPGIQFRSWLGIILLTIISWYSMAVYFVLGYKIIHKIRCMTINRTLSATSLRLQRQLFVTLVVQTCIPIVASFLPTVISWYAPIFGIDIGWWNTNVSTIALAAFPCIDPLAVIILVPNYRNTLLRRPISIEPDTSGNINPPISNVVSMVRRITTIAGTAF

SEQ ID NO: 281 - protein, 344 aa, Caenorhabditis elegans
MIYISWYHQNFPRIFGVFSYIINPIFIYLALTKSKTQMGNYRFLLVAFAVFDLFYSTNEFLTPLAVTGNSHGFVVFLTEGPFFEHPELGAHAISNRCGFISLSYALLIIHFVYRYIALFHPELHRNFFHPIGVLIYALFLLIHGASWSVICQQCLGGTDEIRELIRDEFMAEYHADTRDVPMLAALYWNASDAIRFRSWLGIVLLTVISFYAMTIYFVLGYKIMRKIRSMQANSSMSKNSIRLQKKLFLTLIIQTCIPIFASFLPTVLSWYAPIFGIDLSWWNTNVATVALSAFPFIDPLAVIYLVPSYRNAILRKRDPTVASSSAIQGANKNASKIDCSSGIN

SEQ ID NO: 282 - protein, 342 aa, Caenorhabditis elegans
MIYISWYHQNLPRIFGIFSFIINPIFIYLAMTKSRSQMGKYKYLLIIFAIFDILYSISEILTPIGITGNKHGFVVFLTEGPFFEHPEIGQHVMSNRCGFISLSYALLIIHFVYRYMALFHADKLPIFFQPLGIIISIIFLLMHAASWSVICQQCLAGNEEVREIISIDFLENFGANSKSLPMLAAIYYDASDYIRFRSWLGIFLLTAFSFYAMSVYIILGFKIMRKITLMQSTNKLSKNSIRLQKQLFQTLIIQTCIPIIGSFLPTVISWYAPIFGVNMEWWNMNVATVAMAAFPFIDPLAVIYLIPSYRNAILRKRGNIVDDSSHVKTRQSSRMQSYAFSS

SEQ ID NO: 283 - protein, 338 aa, Caenorhabditis elegans
MYIHWSHHYLPKLFGILSFVCNPIFICLIATEKKASIGKYRYLLIGFAIFDMAYSTVELIVPVAIHGTGAAFVIYLADGPFFGTGKLGQLAVSIRCGCISLSYGILVIHFIYRYLVLFNTRIIDRLLRPSGLFGLFVFFVFHGIAWSSVCEMCLYGDQEVFDYIYDAFQKDYHVDSHDLSMLMALFFDASPEIKRRSWIGILLLTGISIYAISLYVILGWKIMKKLADNPGVSATTQKLHRQLFKALAVQTFIPICISFSPCMMAWYGPVIGLDLGMWNNYLGVIALSAFPVLDPLAIIFLLPNYRNKLFRTVKMPIKYFYSGTSTVRPNVDNSAQVY

SEQ ID NO: 284 - protein, 335 aa, Caenorhabditis elegans
MNIRWAHRYIPAAFGYLSFVLNPILGYLILTEPKSATIGKYRYLILFFAVFDMVYSTVELLVPLGMHGTGSAFVTYLAHGPFFGKDTIRLAQFAISVRCGFIALSYGILIIHFIYRYIALFRPQLIDDVFRPMGICCMMTFFLAHGVAWTAVCELCLYANDEIRDYIRTTFRDEYDVDSYDIAFVAALYIDGSNETKNKSWAGIFLLFSISSFAVSFYLILGRKIVVKLRTHTALSQQTRNMHRQLFLVLAFQTIIPVCICFSPCMMAWIGPMFYLDFGMWDNYFGVIAFSAFPFLDPLAIICLLPNYRTRITGASVFTSVSPVMPISTVPPVLN

SEQ ID NO: 285 - protein, 343 aa, Caenorhabditis elegans
MYIHWTNHYFPKIFGILSFVANPIFMYLIVTEQKSNSIGKYRFLIFFFAIFDMSYSTVELLAPVGIHGTGAAFVVCLTDGPFYGIKNLHLAQLAVSIRCGCISLSYGILIIHFIYRYITLFFPKLVASIFQSTGCICIFLFFITHGIVWAGVCELFLYGDNEMRDYIRDAFQKDYGVDSYDIAFLGAIYMEASDQVVERSWAGILILTGISTYAVSLYIALGYKIMKKLRDNPAMSVTTKNMHKQLFRALSVQTIIPICISFSPCLVAWYGPVLGFDLGMWNNYLGVIALSAFPFMDPVAIILLLPAYRNRVFGVVPKAPVIVPTLVTRSSHRWTTTANVLAH

SEQ ID NO: 286 - protein, 337 aa, Caenorhabditis elegans
MFVNWAHYLVPKISFFLSLVFNPVFVYLIHSSKHVLFGNYRYLSYFFAIFNLCASAADLLIPVAVFYYRYTFVTLVVDAMRSEQGEASIAFRCSFISGTYGILNIHFIFRYLSLKSNNIIKNYFMPYGLLLSVIYVLFHMSIWAMIDYFCLHSAPEMRDYIRIPFRKLHNESIDNINFVAGLFSEASPDIVQRSWAGIVLLTMIASYSMILYFVLGYKIITGLHIESVTMSQQTAQMQKQLFKALTIQTIIPICVSFMPCSFSFYGAAFNIGFMNWVYWVSAVAVSMFPFLDPLAIILLLPALRRRSPRASTSPRLRLEKYNDLGCDVMIKYLQIKF

SEQ ID NO: 287 - protein, 342 aa, Caenorhabditis elegans
MYINFAHCIIPKISAVCSVLVNPFTVYIVWNDKKLQLGNYRYLLLYFALFNILTSIMDMLVPMCVLNYRYAFSVFVSDGFFEEYSDYHQFIIAFRCSLISGAYAVLHSHFLYRFFVLFNNQFLTRWFMPYGLLTSIFYLIFHVIFWTICCWKYIGGDYDRRLYIRESMFEHHGVDVMNITIIIAQYFEGTPNAMRLSRIGIGSMSVLSIISLAFIFYFGYKICHKLSSQSSDMSEKTKKLQTQLMKALTVQAIIPTCVSFAPCLFAWYQPVFGLDLGRWIQFAAGIAVATFPALDPLALIYFVPTFRRKFIEKLMFFKFTKKNQTACSQVSNIQGTSEGTQK

SEQ ID NO: 288 - protein, 335 aa, Caenorhabditis elegans
MYLNWAHHYIPKIGGVFSIIINLLFIFIAHDDKHVHFGNYRFLLIFFGIYNLLCTVVDLIVPTCVIDYNYAFSYYVVDGYFEKTSPYAPFVLCLRSSIISAGYGVLHAHFVYRYLVLFNQQLLNTYFLPYGLLLSVAHCFLLTSAWTFSAYLLLVPEPERRFYMAQVISEVLSQNVHEMNILIAVYEDLSPKVTWNSRLGVFLVSIISILSVLIYILFSILIVSKLRSTDLALSQKTKRLQKQLAKSLAVQATIPLIVDLFPCFFVWYMPIFKVNIGYWTYWFASIFISFFPVFDPLAMFYFLPVFRVRLRQILRMKERPARVSAMTHTDISRFF

SEQ ID NO: 289 - protein, 334 aa, Caenorhabditis elegans
MYINWAHHYIPKVGGACSFFINVLFIYIVQDDKKVQIGNYKILLLSFAIYNLASTAIDLIVPLCIFDYKRAFSYFVVTGLFEKKSALGAIAICIRCSFIPAAYGILHSHFIYRYMVLFNRQVLTKYFLPYGLIMSVAYCAVLMAIWFYAAYVFVLAQKESRLYLETIFREKFDQDINDLNIVIALYGDASIEIIRNSWTGILIGTFISLYSVVVYVVLGTQIVHKLQSTDLVMSDKTKYLQKQLMNALMVQATIPMIVCFTPCFLAWYLPVFNLDIGNWIYWTSTVAISFFPVLDPLSLFYFLPVFGARVREIIGIKRNTTRISSGLKIATLNS

SEQ ID NO: 290 - protein, 333 aa, Caenorhabditis elegans
MWDIGFVYRHIPKLFGALAFIVNPIFVYLIFTEKSTKFGNYKYLLLYFASFNLVYSVANVVVPIDIHSHRYCFYLFISDGLFFGQSDWHLHMLSARCALVSASYAVLLSHFIYRYLALHNSELTNDKFHTYMTISFGIFCVYFVVWHASCFYLGGANLEIKEYIRTDFRDFYRMDSMDMNMISCLYREGTDHTLLRSWSTTILWTSISAISICMFLMLACMIMKKLNKMSSCMSKKTSTLQLELLRALIIQTVIPIFVSFFPCVISFIIPIFDLDLGRPINYVEVIALGAFAFCDPVAIVLCLPVFRQRVLCQKKKPKKKQNTEINMMSTIAS

SEQ ID NO: 291 - protein, 331 aa, Caenorhabditis elegans
MLTNWIYVFLPRISCALAWVVNPIFIYLIFTESSNKFGNYRFLLLYFALFNLTYSVVNIVVPIDIITYRYCFIVILRDGWFVELSDFNFSLLSARCSLVGTTFALILVHFIYRYLAIQNSSLTRNNFHWYMTGSIFASVFHFSVWHLTCLYFTRAEFEMRQYVTPGIRRTFGNETIDFNILGGVFHEVPNSVVKRTWIAILTCTSISVLTIIKFIVLSRMIINKLNNMSITASKKTARFQFELFRALIVQTTIPIVISFAPCLFCWYIPMFGIELPRAFNYYEVSAFGIFPFVDPIAIILCLPIFRTRIFRFLSSISSGFFEKPSNASRTK

SEQ ID NO: 292 - protein, 350 aa, Caenorhabditis elegans
MFEDWIYKYLPRTFCALTFLVNPIFIYLIFSEKSSKFGNYRYLLLYFAIFNLLYSIMNVLVPLDIHTFGYSFFLIVRHGWFQTEGNSSQLNFHMLIARTSSVSSSYAVLMSHFIYRYLVISDSSLTRHHFHWFMTGSVYMLFAYFSVWHATCYFPGKANSELLEYVSEDFQENFGMDSRNLNVIGTLFSVGSHETTLRAWTAMSIWSTISIASIITFFVMAGLVMRKLRKMTVRTSQKTSQFQFELLRALIVQTVTPICFSFSPCLLCWYSPIFGIKLDRWLNYLEVTALGLFSFMDPIAIILCLPIFRYRIFNVINCIARACAKNQSDNDSKRENSTQTINLRKAISIH

SEQ ID NO: 293 - protein, 331 aa, Caenorhabditis elegans
MQSSDNINNTWFDEFNSVFTGVLSLIFNIALILVTSKVKIYSDYVKRMQIFGAVLRLIFSVLIVFSSPTLAYITDAEAVYIVKGGFSLPIKLGRAMLITFVTFVIFSCMGPPMQFLQMVFIVKKTTRTQKNVVLTTTIISFIVSLISTVLITFGYVPDAADDQLSEYIVYNLNGIGKSAYLIASLERYDYTLNDFVADPISWACTIYIMAVLVITTVIAMVCWTIIRYEIHKGSRSTNSMKSQQQLNMVLMVQFILPFLTIHIPFYVSFLMPLFRIETSHLSVYLPYLFSWCPALNPILVMIMVKSIREKAFDAMSIGSRSHSTIINVFNR

SEQ ID NO: 294 - protein, 336 aa, Caenorhabditis elegans
MTTPIPEELHETFVNEANAYIAGFVSLIANLVLIYVTSKVKTYSKEFQWTQYYVAILRLIFSMVVVVTSPTLVYVSKMKSLYIVKGGFFLPFDMGTFFLTLFVFFVVISCCSPTIQYLQICHVLSDNGHKNPKFGPIISTISVIFGIPTLILVYFGYTPSPEEATEAKQIVYYLNGEGDSAFLMITAKRGGTIDWTSIICTVYIFVIMISSSITVFICAINIYKQMKKKMLSDAAKKSQQQINLILLLQFLFPFLLIHIPFYESFIFPIFNIENPFLANNLPFLFSWCPAINPILVMVMVKNVRDRLLCRSAGSKISSSNMIQVRQQSQVVSSRLK

SEQ ID NO: 295 - protein, 301 aa, Caenorhabditis elegans
METTAQRMYQSFNNSFIDDINCYISNCYISRVQAIIYSKSMASLYIIKNGFDFPTPVGDVFLSLFVAFIVMSCNGPAVQYLQVAHLLSSSSKKEANKAISTMPIAVVISSLILIFFGYVPPFYEIHISSLVLEKIAEQGDTAFLIVTVRLTIEDTNTFQLLSQICTLFILIVMFISIIIVILCYTFIQKQMKTRFSASSITKKSQEQLNMTLLLQFILPFVTIHVPFYIIVILPFFRIAGRVLSDHLLLLFCWCPAINPILVILMIKNVQDQLIPKKFSKTSTMSKLSQAQSKSIRVINLE

SEQ ID NO: 296 - protein, 349 aa, Caenorhabditis elegans
MTSTAPPESESSDDIGPPAELGPIIRSYHFYNDLVAGVLSIMLNVLVILVFTTRISTASKLFKKVMTVTKLVEMLFSASYILTAPVFTSISVDDSFTGLMIVNTGWQFNFYYSQIVLAAALVFLTQQIFLAPWLYYIRYDQVCKKHGVRCIDFLKMLIINLIFQVLTSVSLCFSSFPTSKDITELQFVANKFTGSNSAFLLLSYTKEVDTVREQIEHVGSIMSAVAYVLTLILSILVMILCTIKINLKVRESKNSSNNLLVLQKKMNRVLLAQFFCPLIFIQAPFYYSVLGPIVGLSQGLVTDLLPLLFAWSPVVNTLFIFILNSEIRNALIGKQHVSTSEVRSFANKS

SEQ ID NO: 297 - protein, 358 aa, Caenorhabditis elegans
MNFEKFLFPPPPLPGNRTSMQLGPPSELAPVIQRYHFYNDLIAGILSITIGSLLIFLVTTRISTPTRLFKKVQAISKCTEILFSASYILTAPVFTSIVMNDTFSGLMIVNTGWQFNFHFSQIFLSAALFLLTEQIFLAPWHYYIRYAQVCRKGAGCIDVSIIVVLNIILQILTSMNLCYAALPTSEDIQLLQEIANKFTLSYSAFLLLSYKKEVDSVADSVDKVLSIISAVSYVSSLVFSIFLMIFFTIKMNLKIRESTNTSSNLLELQRKLNRLLLAQFFSPLIFIQVPFYYSVLGPIVGLSQGLVTDLFPLLFAWSPVFNTFLIFILNSEIRSALIGKQRTSTTSDARRSVGGNQN

SEQ ID NO: 298 - protein, 472 aa, Artificial Sequence
  Chimeric G protein
MGCTVSTQTIGDESDPFLQNKRANDVIEQSLQLEKQRDKNEIKLLLLGAGESGKSTVLKQLKLLHQGGFSHQERLQYAQVIWADAIQSMKILIIQARKLGIQLDCDDPINNKDLFACKRILLKAKALDYINASVAGGSDFLNDYVLKYSERYETRRRVQSTGRAKAAFDEDGNISNVKSDTDRDAETVTQNEDADRNNSSRINLQDICKDLNQEGDDQMFVRKTSREIQGQNRRNLIHEDIAKAIKQLWNNDKGIKQCFARSNEFQLEGSAAYYFDNIEKFASPNYVCTDEDILKGRIKTTGITETEFNIGSSKFKVLDAGGQRSERKKWIHCFEGITAVLFVLAMSEYDQMLFEDERVNRMHESIMLFDTLLNSKWFKDTPFILFLNKIDLFEEKVKSMPIRKYFPDYQGRVGDAEAGLKYFEKIFLSLNKTNKPIYVKRTCATDTQTMKFVLSAVTDLIIQQNLKKAGMM

SEQ ID NO: 299 - protein, 472 aa, Artificial Sequence
  Chimeric G proteins
MGCTVSTQTIGDESDPFLQNKRANDVIEQSLQLEKQRDKNEIKLLLLGAGESGKSTVLKQLKLLHQGGFSHQERLQYAQVIWADAIQSMKILIIQARKLGIQLDCDDPINNKDLFACKRILLKAKALDYINASVAGGSDFLNDYVLKYSERYETRRRVQSTGRAKAAFDEDGNISNVKSDTDRDAETVTQNEDADRNNSSRINLQDICKDLNQEGDDQMFVRKTSREIQGQNRRNLIHEDIAKAIKQLWNNDKGIKQCFARSNEFQLEGSAAYYFDNIEKFASPNYVCTDEDILKGRIKTTGITETEFNIGSSKFKVLDAGGQRSERKKWIHCFEGITAVLFVLAMSEYDQMLFEDERVNRMHESIMLFDTLLNSKWFKDTPFILFLNKIDLFEEKVKSMPIRKYFPDYQGRVGDAEAGLKYFEKIFLSLNKTNKPIYVKRTCATDTQTMKFVLSAVTDLIIQQNLKGCGLY

SEQ ID NO: 300 - protein, 472 aa, Artificial Sequence
  Chimeric G proteins
MGCTVSTQTIGDESDPFLQNKRANDVIEQSLQLEKQRDKNEIKLLLLGAGESGKSTVLKQLKLLHQGGFSHQERLQYAQVIWADAIQSMKILIIQARKLGIQLDCDDPINNKDLFACKRILLKAKALDYINASVAGGSDFLNDYVLKYSERYETRRRVQSTGRAKAAFDEDGNISNVKSDTDRDAETVTQNEDADRNNSSRINLQDICKDLNQEGDDQMFVRKTSREIQGQNRRNLIHEDIAKAIKQLWNNDKGIKQCFARSNEFQLEGSAAYYFDNIEKFASPNYVCTDEDILKGRIKTTGITETEFNIGSSKFKVLDAGGQRSERKKWIHCFEGITAVLFVLAMSEYDQMLFEDERVNRMHESIMLFDTLLNSKWFKDTPFILFLNKIDLFEEKVKSMPIRKYFPDYQGRVGDAEAGLKYFEKIFLSLNKTNKPIYVKRTCATDTQTMKFVLSAVTDLIIQQNLKAKRKK

SEQ ID NO: 301 - protein, 472 aa, Artificial Sequence
  Chimeric G proteins
MGCTVSTQTIGDESDPFLQNKRANDVIEQSLQLEKQRDKNEIKLLLLGAGESGKSTVLKQLKLLHQGGFSHQERLQYAQVIWADAIQSMKILIIQARKLGIQLDCDDPINNKDLFACKRILLKAKALDYINASVAGGSDFLNDYVLKYSERYETRRRVQSTGRAKAAFDEDGNISNVKSDTDRDAETVTQNEDADRNNSSRINLQDICKDLNQEGDDQMFVRKTSREIQGQNRRNLIHEDIAKAIKQLWNNDKGIKQCFARSNEFQLEGSAAYYFDNIEKFASPNYVCTDEDILKGRIKTTGITETEFNIGSSKFKVLDAGGQRSERKKWIHCFEGITAVLFVLAMSEYDQMLFEDERVNRMHESIMLFDTLLNSKWFKDTPFILFLNKIDLFEEKVKSMPIRKYFPDYQGRVGDAEAGLKYFEKIFLSLNKTNKPIYVKRTCATDTQTMKFVLSAVTDLIIQQNLKKSGLY

SEQ ID NO: 302 - protein, 472 aa, Artificial Sequence
  Chimeric G proteins
MGCTVSTQTIGDESDPFLQNKRANDVIEQSLQLEKQRDKNEIKLLLLGAGESGKSTVLKQLKLLHQGGFSHQERLQYAQVIWADAIQSMKILIIQARKLGIQLDCDDPINNKDLFACKRILLKAKALDYINASVAGGSDFLNDYVLKYSERYETRRRVQSTGRAKAAFDEDGNISNVKSDTDRDAETVTQNEDADRNNSSRINLQDICKDLNQEGDDQMFVRKTSREIQGQNRRNLIHEDIAKAIKQLWNNDKGIKQCFARSNEFQLEGSAAYYFDNIEKFASPNYVCTDEDILKGRIKTTGITETEFNIGSSKFKVLDAGGQRSERKKWIHCFEGITAVLFVLAMSEYDQMLFEDERVNRMHESIMLFDTLLNSKWFKDTPFILFLNKIDLFEEKVKSMPIRKYFPDYQGRVGDAEAGLKYFEKIFLSLNKTNKPIYVKRTCATDTQTMKFVLSAVTDLIIQQNLKDTNLE

SEQ ID NO: 303 - protein, 472 aa, Artificial Sequence
  Chimeric G proteins
MGCTVSTQTIGDESDPFLQNKRANDVIEQSLQLEKQRDKNEIKLLLLGAGESGKSTVLKQLKLLHQGGFSHQERLQYAQVIWADAIQSMKILIIQARKLGIQLDCDDPINNKDLFACKRILLKAKALDYINASVAGGSDFLNDYVLKYSERYETRRRVQSTGRAKAAFDEDGNISNVKSDTDRDAETVTQNEDADRNNSSRINLQDICKDLNQEGDDQMFVRKTSREIQGQNRRNLIHEDIAKAIKQLWNNDKGIKQCFARSNEFQLEGSAAYYFDNIEKFASPNYVCTDEDILKGRIKTTGITETEFNIGSSKFKVLDAGGQRSERKKWIHCFEGITAVLFVLAMSEYDQMLFEDERVNRMHESIMLFDTLLNSKWFKDTPFILFLNKIDLFEEKVKSMPIRKYFPDYQGRVGDAEAGLKYFEKIFLSLNKTNKPIYVKRTCATDTQTMKFVLSAVTDLIIQQNLKAGLHE

SEQ ID NO: 304 - DNA, 1419 bp, Artificial Sequence
  Chimeric G proteins
atggggtgtacagtgagtacgcaaacaataggagacgaaagtgatccttttctacagaacaaaagagccaatgatgtcatcgagcaatcgttgcagctggagaaacaacgtgacaagaatgaaataaaactgttactattaggtgccggtgagtcaggtaaatcaacggttttaaaacaattaaaattattacatcaaggcggtttctcccatcaagaaaggttacagtatgctcaagtgatatgggcagatgccatacaatcaatgaaaattttgattattcaggccagaaaactaggtattcaacttgactgtgatgatccgatcaacaataaagatttgtttgcatgcaagagaatactgctaaaggctaaagctttagattatatcaacgccagtgttgccggtggttctgattttctaaatgattatgtactgaagtactcagaaaggtatgaaactaggaggcgtgttcagagtaccggacgagcaaaagctgctttcgatgaagacggaaatatttctaatgtcaaaagtgacactgacagagatgctgaaacggtgacgcaaaatgaggatgctgatagaaacaacagtagtagaattaacctacaggatatttgcaaggacttgaaccaagaaggcgatgaccagatgtttgttagaaaaacatcaagggaaattcaaggacaaaatagacgaaatcttattcacgaagacattgctaaggcaataaagcaactttggaataacgacaaaggtataaagcagtgttttgcacgttctaatgagtttcaattggagggctcagctgcatactactttgataacattgagaaatttgctagtccgaattatgtctgtacggatgaagacattttgaagggccgtataaagactacaggcattacagaaaccgaatttaacatcggctcgtccaaattcaaggttctcgacgctggtgggcagcgttctgaacgtaagaagtggattcattgtttcgaaggaattacagcagttttatttgttttagcaatgagtgaatacgaccagatgttgtttgaggatgaaagagtgaacagaatgcatgaatcaataatgctatttgacacgttattgaactctaagtggttcaaagatacaccgtttattttgtttttaaataaaattgatttgttcgaggaaaaggtaaaaagcatgcccataagaaagtactttcctgattaccagggacgtgtcggcgatgcagaagcgggtctaaaatattttgagaagatatttttgagcttgaataagacaaacaaaccaatctacgtgaaacgaacctgcgctaccgatacccaaactatgaagttcgtattgagtgcagtcaccgatctaatcatccagcaaaaccttaaaaaagcgggcatgatgtga

SEQ ID NO: 305 - DNA, 1419 bp, Artificial Sequence
  Chimeric G proteins
atggggtgtacagtgagtacgcaaacaataggagacgaaagtgatccttttctacagaacaaaagagccaatgatgtcatcgagcaatcgttgcagctggagaaacaacgtgacaagaatgaaataaaactgttactattaggtgccggtgagtcaggtaaatcaacggttttaaaacaattaaaattattacatcaaggcggtttctcccatcaagaaaggttacagtatgctcaagtgatatgggcagatgccatacaatcaatgaaaattttgattattcaggccagaaaactaggtattcaacttgactgtgatgatccgatcaacaataaagatttgtttgcatgcaagagaatactgctaaaggctaaagctttagattatatcaacgccagtgttgccggtggttctgattttctaaatgattatgtactgaagtactcagaaaggtatgaaactaggaggcgtgttcagagtaccggacgagcaaaagctgctttcgatgaagacggaaatatttctaatgtcaaaagtgacactgacagagatgctgaaacggtgacgcaaaatgaggatgctgatagaaacaacagtagtagaattaacctacaggatatttgcaaggacttgaaccaagaaggcgatgaccagatgtttgttagaaaaacatcaagggaaattcaaggacaaaatagacgaaatcttattcacgaagacattgctaaggcaataaagcaactttggaataacgacaaaggtataaagcagtgttttgcacgttctaatgagtttcaattggagggctcagctgcatactactttgataacattgagaaatttgctagtccgaattatgtctgtacggatgaagacattttgaagggccgtataaagactacaggcattacagaaaccgaatttaacatcggctcgtccaaattcaaggttctcgacgctggtgggcagcgttctgaacgtaagaagtggattcattgtttcgaaggaattacagcagttttatttgttttagcaatgagtgaatacgaccagatgttgtttgaggatgaaagagtgaacagaatgcatgaatcaataatgctatttgacacgttattgaactctaagtggttcaaagatacaccgtttattttgtttttaaataaaattgatttgttcgaggaaaaggtaaaaagcatgcccataagaaagtactttcctgattaccagggacgtgtcggcgatgcagaagcgggtctaaaatattttgagaagatatttttgagcttgaataagacaaacaaaccaatctacgtgaaacgaacctgcgctaccgatacccaaactatgaagttcgtattgagtgcagtcaccgatctaatcatccagcaaaaccttaaaggatgcggtttgtactga

SEQ ID NO: 306 - DNA, 1419 bp, Artificial Sequence
  Chimeric G proteins
atggggtgtacagtgagtacgcaaacaataggagacgaaagtgatccttttctacagaacaaaagagccaatgatgtcatcgagcaatcgttgcagctggagaaacaacgtgacaagaatgaaataaaactgttactattaggtgccggtgagtcaggtaaatcaacggttttaaaacaattaaaattattacatcaaggcggtttctcccatcaagaaaggttacagtatgctcaagtgatatgggcagatgccatacaatcaatgaaaattttgattattcaggccagaaaactaggtattcaacttgactgtgatgatccgatcaacaataaagatttgtttgcatgcaagagaatactgctaaaggctaaagctttagattatatcaacgccagtgttgccggtggttctgattttctaaatgattatgtactgaagtactcagaaaggtatgaaactaggaggcgtgttcagagtaccggacgagcaaaagctgctttcgatgaagacggaaatatttctaatgtcaaaagtgacactgacagagatgctgaaacggtgacgcaaaatgaggatgctgatagaaacaacagtagtagaattaacctacaggatatttgcaaggacttgaaccaagaaggcgatgaccagatgtttgttagaaaaacatcaagggaaattcaaggacaaaatagacgaaatcttattcacgaagacattgctaaggcaataaagcaactttggaataacgacaaaggtataaagcagtgttttgcacgttctaatgagtttcaattggagggctcagctgcatactactttgataacattgagaaatttgctagtccgaattatgtctgtacggatgaagacattttgaagggccgtataaagactacaggcattacagaaaccgaatttaacatcggctcgtccaaattcaaggttctcgacgctggtgggcagcgttctgaacgtaagaagtggattcattgtttcgaaggaattacagcagttttatttgttttagcaatgagtgaatacgaccagatgttgtttgaggatgaaagagtgaacagaatgcatgaatcaataatgctatttgacacgttattgaactctaagtggttcaaagatacaccgtttattttgtttttaaataaaattgatttgttcgaggaaaaggtaaaaagcatgcccataagaaagtactttcctgattaccagggacgtgtcggcgatgcagaagcgggtctaaaatattttgagaagatatttttgagcttgaataagacaaacaaaccaatctacgtgaaacgaacctgcgctaccgatacccaaactatgaagttcgtattgagtgcagtcaccgatctaatcatccagcaaaaccttaaagcaaaaagaaagaaatga

SEQ ID NO: 307 - DNA, 1419 bp, Artificial Sequence
  Chimeric G proteins
atggggtgtacagtgagtacgcaaacaataggagacgaaagtgatccttttctacagaacaaaagagccaatgatgtcatcgagcaatcgttgcagctggagaaacaacgtgacaagaatgaaataaaactgttactattaggtgccggtgagtcaggtaaatcaacggttttaaaacaattaaaattattacatcaaggcggtttctcccatcaagaaaggttacagtatgctcaagtgatatgggcagatgccatacaatcaatgaaaattttgattattcaggccagaaaactaggtattcaacttgactgtgatgatccgatcaacaataaagatttgtttgcatgcaagagaatactgctaaaggctaaagctttagattatatcaacgccagtgttgccggtggttctgattttctaaatgattatgtactgaagtactcagaaaggtatgaaactaggaggcgtgttcagagtaccggacgagcaaaagctgctttcgatgaagacggaaatatttctaatgtcaaaagtgacactgacagagatgctgaaacggtgacgcaaaatgaggatgctgatagaaacaacagtagtagaattaacctacaggatatttgcaaggacttgaaccaagaaggcgatgaccagatgtttgttagaaaaacatcaagggaaattcaaggacaaaatagacgaaatcttattcacgaagacattgctaaggcaataaagcaactttggaataacgacaaaggtataaagcagtgttttgcacgttctaatgagtttcaattggagggctcagctgcatactactttgataacattgagaaatttgctagtccgaattatgtctgtacggatgaagacattttgaagggccgtataaagactacaggcattacagaaaccgaatttaacatcggctcgtccaaattcaaggttctcgacgctggtgggcagcgttctgaacgtaagaagtggattcattgtttcgaaggaattacagcagttttatttgttttagcaatgagtgaatacgaccagatgttgtttgaggatgaaagagtgaacagaatgcatgaatcaataatgctatttgacacgttattgaactctaagtggttcaaagatacaccgtttattttgtttttaaataaaattgatttgttcgaggaaaaggtaaaaagcatgcccataagaaagtactttcctgattaccagggacgtgtcggcgatgcagaagcgggtctaaaatattttgagaagatatttttgagcttgaataagacaaacaaaccaatctacgtgaaacgaacctgcgctaccgatacccaaactatgaagttcgtattgagtgcagtcaccgatctaatcatccagcaaaaccttaaaaaatctggactctattga

SEQ ID NO: 308 - DNA, 1419 bp, Artificial Sequence
  Chimeric G proteins
atggggtgtacagtgagtacgcaaacaataggagacgaaagtgatccttttctacagaacaaaagagccaatgatgtcatcgagcaatcgttgcagctggagaaacaacgtgacaagaatgaaataaaactgttactattaggtgccggtgagtcaggtaaatcaacggttttaaaacaattaaaattattacatcaaggcggtttctcccatcaagaaaggttacagtatgctcaagtgatatgggcagatgccatacaatcaatgaaaattttgattattcaggccagaaaactaggtattcaacttgactgtgatgatccgatcaacaataaagatttgtttgcatgcaagagaatactgctaaaggctaaagctttagattatatcaacgccagtgttgccggtggttctgattttctaaatgattatgtactgaagtactcagaaaggtatgaaactaggaggcgtgttcagagtaccggacgagcaaaagctgctttcgatgaagacggaaatatttctaatgtcaaaagtgacactgacagagatgctgaaacggtgacgcaaaatgaggatgctgatagaaacaacagtagtagaattaacctacaggatatttgcaaggacttgaaccaagaaggcgatgaccagatgtttgttagaaaaacatcaagggaaattcaaggacaaaatagacgaaatcttattcacgaagacattgctaaggcaataaagcaactttggaataacgacaaaggtataaagcagtgttttgcacgttctaatgagtttcaattggagggctcagctgcatactactttgataacattgagaaatttgctagtccgaattatgtctgtacggatgaagacattttgaagggccgtataaagactacaggcattacagaaaccgaatttaacatcggctcgtccaaattcaaggttctcgacgctggtgggcagcgttctgaacgtaagaagtggattcattgtttcgaaggaattacagcagttttatttgttttagcaatgagtgaatacgaccagatgttgtttgaggatgaaagagtgaacagaatgcatgaatcaataatgctatttgacacgttattgaactctaagtggttcaaagatacaccgtttattttgtttttaaataaaattgatttgttcgaggaaaaggtaaaaagcatgcccataagaaagtactttcctgattaccagggacgtgtcggcgatgcagaagcgggtctaaaatattttgagaagatatttttgagcttgaataagacaaacaaaccaatctacgtgaaacgaacctgcgctaccgatacccaaactatgaagttcgtattgagtgcagtcaccgatctaatcatccagcaaaaccttaaagacaccaatttagaatga

SEQ ID NO: 309 - DNA, 1419 bp, Artificial Sequence
  Chimeric G proteins
atggggtgtacagtgagtacgcaaacaataggagacgaaagtgatccttttctacagaacaaaagagccaatgatgtcatcgagcaatcgttgcagctggagaaacaacgtgacaagaatgaaataaaactgttactattaggtgccggtgagtcaggtaaatcaacggttttaaaacaattaaaattattacatcaaggcggtttctcccatcaagaaaggttacagtatgctcaagtgatatgggcagatgccatacaatcaatgaaaattttgattattcaggccagaaaactaggtattcaacttgactgtgatgatccgatcaacaataaagatttgtttgcatgcaagagaatactgctaaaggctaaagctttagattatatcaacgccagtgttgccggtggttctgattttctaaatgattatgtactgaagtactcagaaaggtatgaaactaggaggcgtgttcagagtaccggacgagcaaaagctgctttcgatgaagacggaaatatttctaatgtcaaaagtgacactgacagagatgctgaaacggtgacgcaaaatgaggatgctgatagaaacaacagtagtagaattaacctacaggatatttgcaaggacttgaaccaagaaggcgatgaccagatgtttgttagaaaaacatcaagggaaattcaaggacaaaatagacgaaatcttattcacgaagacattgctaaggcaataaagcaactttggaataacgacaaaggtataaagcagtgttttgcacgttctaatgagtttcaattggagggctcagctgcatactactttgataacattgagaaatttgctagtccgaattatgtctgtacggatgaagacattttgaagggccgtataaagactacaggcattacagaaaccgaatttaacatcggctcgtccaaattcaaggttctcgacgctggtgggcagcgttctgaacgtaagaagtggattcattgtttcgaaggaattacagcagttttatttgttttagcaatgagtgaatacgaccagatgttgtttgaggatgaaagagtgaacagaatgcatgaatcaataatgctatttgacacgttattgaactctaagtggttcaaagatacaccgtttattttgtttttaaataaaattgatttgttcgaggaaaaggtaaaaagcatgcccataagaaagtactttcctgattaccagggacgtgtcggcgatgcagaagcgggtctaaaatattttgagaagatatttttgagcttgaataagacaaacaaaccaatctacgtgaaacgaacctgcgctaccgatacccaaactatgaagttcgtattgagtgcagtcaccgatctaatcatccagcaaaaccttaaagctggattacatgagtga

SEQ ID NO: 310 - DNA, 1086 bp, Caenorhabditis elegans
atggctaaagaatctaccgtcgaatcagacgtcatgcttgacgagccggcgtttgcggttttttacggaatactagtattaataagtgatttgttatctctgttctttattttcacaattatgaccaaatctactgcagatatgaaacttttcaaatttgctctactgaaactagcgatttgtgatctgctgctcaatttttcaactgcaatactcgtcaccccagatcttctctgccctctatcggcagttgctgttcgaagcccaataggtggaattagtgaagctcacgcattttcaacgatttcactaacgatagcaattgcaattacagtattcacatctatcaatgattgttgctttttgagagtttgtatattttatcaatggactcatattttgaaaaaaatatattcttggagaggtgctctcgtatttctgacgctgaatgtggtgattgttggtattttaactttggcagtatggtttgcaaccagctctaatgaggaatttctactcgtcgtctcagctgaaaacatgacacacgcacttggaaaatacgcttctcaatctgaaactgtgtacttttacgtggatatctggaagcccaaagttgttccacttttgttatcagttgttgttggtctagctgcaatatatgtatcaaatctctgtggatcaagattggtttggaaagcaattgatagaagaaagaataacatgtcttttaaaagttatgaaactcacagacatttaactttacttgctctttttcaaaacttgataccagcagttgtaattgcttttcccgtatttcttgttgcattttcatttgtgatgagctatgagtctgacacttttgctgaactcataaaacattttgtaacttttgtcatttctatttatccggctttgagcgtcatgttgagctttattttcattaaaccttaccggaaatatttattttctctcatctgttcaattcctgctctccgaaaaaaacctagtcgggtatctgacacccaactgtccaaaaagagctcaatgggaaacgaagactactttgattttgttgggtatatgtaa

SEQ ID NO: 311 - DNA, 1038 bp, Caenorhabditis elegans
atggataatttcgaattaatcgttttcttaactcaacgagtttgtacaattctagcttttttgatccacttccctctcacgttacttattctctacaagtcaccaagtagtttcggtgcttacaaatacttgctcacttatatatcaatctttgagttagtgtatgctgtgttagatgttcttgtatcaccacaactatacacacataaatctgcattcatgttggttttggattcaaataaaacatttttacctttctggacactttacccaattgatttattattttgtggaatgcttggatgttcaatggctatttttaccattaatttcatttatcgatatttggttatgaaaggaagcgagcttctcaaatccttcgagtcttccaaactgtttatttggattgcttctccaatggtttacagtgccatttggatgtttatcactgaaatgacattacaagggaatccggatactgataagttattagaagacacttttcttaaaaaacaaaaaataagtctgtctgaagttgtgtacattggaccaaattattatcctgaagaaggcgttattgattggattccaattattggaatgatttctttgacactaatgatttttgtctcagtatattcaattatttatttcgcagtcaattcatacgttgcaatgaataaattggtattaacttctgtaaactctcaacgatataaagctaatcaaactgaacttctcaatgcattagtcattcaagcaataattccatttgctcttatgcattttcctgcttccattgtattcataactccatttttcaactgtggaaatcaaacatttgctagaatattcagtgttacagttgctctttatccagttttagatcctctaccaactattttcgtcgtcaaatgctatcgaaaagcggtgattaaatacttaaatattttattttcattttgctccaatcaaccaacaatagttactgaacaacattcttcaacttcatataaatgtccagcaattactgcttga

SEQ ID NO: 312 - DNA, 1008 bp, Caenorhabditis elegans
atgtgctctactagatggcttgaacttacttattacgccgaaactattggattttgcctctcgatttcatttaattttatacttttactattaatcagtgaaatgccaaaaaagatattcggaagttataaatatcttatgctgtctttttcggttctgggaatgttctattcatgttgcaatgtactagcgaaaccgaacttgtacatcacagatgtctcatttgcagcgttcaatattctgaaaaatacaggattttcaaaatctttcgggagtattgctatagccatatacagttcctgttatggaatgatgattgtcctgctcaccattaacttctactaccgatacctttccgtcacatgtcctgctaaactcactagattctcggctaaaaactctccgatttgggtgttccttatactcttcaactcatccacgtggtttgtactgagctattttgtcaatggcccaacttcgatgaaagatgaaatcttacaacctgagctgttacaagcttattgtatgcagcctgaggattacgcgtatgtgggtcctcaatacttttataaagacgaaggagaaatgaaattccatctcccatcctggattgcttccggcggcatggcattcactatgttcatcacaaatactttgctgacatactttggcattgaaacctacagacatcttaacaaaattggcagcattgccggtattgagtaccgagagcttcagcggcaacttttccgaactttggttattcaaacagctatcccaatggtctttatgtacttcccaatttcctgtatgttcctgttcccgatattcgggataaaagctgaatcgctggccaatgttgttccaattgcggttgcaatctacccctgcttcgagccacttgctgcaatgtattgcattaagagctttcaaaagcggattttcagtattttaacttgtaacaagttcaataaatcaatgcatagtactgttgttccggtgatttga

SEQ ID NO: 313 - DNA, 1041 bp, Caenorhabditis elegans
atgtgctcttctctctggctgagcttaaactctttggctggatatatcgggtcatgcctttccatttcctgtaactttatagttttactgttaatcagcgagatgcctaaaaaggtatttgggagctataaatatctcatgttcactttttcaactgtcggaataatgttttcttgcagtgatttaatattaaagccgaatatgcacgtcacgaacacctctttcatattgttcacgcttcttgaacactctggattttcaaagccttcggggctgctatttttatcgttttccgatgcattctataggatgatcataactttgctagcaattcattttctataccgatacttatcggtggttcgtcccttcaatatgttcatattttccatgaaattcgcccctttgtggattctggttttggttttcaatttctctatgtggacattttgcttttactatttaaatggaccctctgaaatgaaagatgaagaagtgattcctgagtttttggatgtttactgtcttcacccaaatgagtacacctacacaggacctcactattattacacagacaattcaactggaaaatggaaatttcataatccctccttcgttgctgaaggctacacgggcggtaatgtagctttaaccataatttccgtagcatactttggctatcaaacctaccaacatctttataagcttggaacaatgacaagtgtgaactatcgggaggttcattatcagctattcaagacattactaattcaaacaatatttccaagtttacttgtgttcttcccggctgcctgtttaatattattccctgcttttggagtcggaatcggagaaaatgcaaatttattgatgatatcattttcaatgtacccatgtttcgaaccgcttgttgcagtgtgttgtattaaaagtttccggaaacgaatactaggcatttttcgatgtttgactgtcagaaagagctctcaaatttcaaatttatctacggtggtggttaccgggaaagtaacatgtgcataa

SEQ ID NO: 314 - DNA, 1029 bp, Caenorhabditis elegans
atgtgctcctccctttggctggagtcaaacttttatgctggaaacattggatttggattatcaatcactttcaacttgatagtactggttttgatcagtgaaatgccgaagaggatttttgggaactataagtacctgatgtttgcattttcaacagtcggtattttcttctcgtgctgtgactttttcatcaaaccgaacatgcacatcaccaagacttctttcatcatattcacagacttgaaacgctctggatattcatattctaccgcgcaaattgctctagcaatactatgttcatcgtatggattggtgctgacaatgctggcaattcatttcttttatcgttatctatctgtgaaatctccatctaacttgtcaatattttctctgaaagctgctcctatttgggttatatctctcagtgtcaactttgtgatttggttcttttgcttttttaatttaaactccccgtctccaatgaaagatgaagagctgattcctgagttttgggaggcttactgtcttaaatcaaatgagtatacctacactggacctcactactattacacagacaattcaactggagaatggaaatttcatattccgtcgtttgtggctgaaggctatacagctggaaatatagctattgcaatcattctattgagcatatttggcgttaaaacttacaaccatctttataaacttggtggaatgtctagtctgaactcgcgtgaaattcagagccaattgttcaaaactttggtggtccaaactatattcccaagtatatttttatttttcccagtgtcatgcttagttttgttcccagttttcggaatcagaattggagaaaatgctaatctgatcatgatttcattttctatatatccatgcttcgaacctcttgtcgccatttgttgcattaaaactttccggcggcgactgcttggaatcgtcccgtgctacaaaaagaatagagttactcgcgtttccagccaattttataatcaaacaacaacaacctag

SEQ ID NO: 315 - DNA, 1041 bp, Caenorhabditis elegans
atgtctggtcaattatggttggccctcgtggatgctgccgatatggtaggattcactctcacgatctccatcaacatcattctactggggctgattagaacacgtggaaaaacgttgggaacgtacaaatacttgatgagcttcttctcgttcttctcaatcttttatgcaatcgttgaatctattttgagaccaataatgcatatcgaaaacacgacgttctttctgatttctcggaaacgcttcgattactcaactcgccttggtaaaatcaactctgctttctactgtgcttgttttgccacgagttttgtcctgtctgcggtacactttgtgtatcggtactttgccgcttgcaaaccgaatctgctacgcttgtttaaccttccgcatcttttactgtggcctttgatgtgttcgattcctgtgactgcgtgggcaagtgtttcttactttttgtacccagacaccgagtacactgaagcagcagttacatatgttctgaaaacacactacgaggtgatcaaaaaagaaaatgtatcttatatcgcatacgtatactatcaatatgaaaatggggagcgtcacatctacataaaaaatttgcttggctgctttgtacactacttcgttatgtcaatgacatttgtagttgtgttttactgcggattttctacatggtggacgattcgtgagcatcgtggagcatctgataggacacgtcacctgcatagacaattgtttaaggcacttgtatttcaaacccttgttccatcaatatttatgtacatcccaactggtgtcatgttcatcgctccctttttcgacatcaacctgaatgccaatgcaaacttcatcgttttttgctcatttctctatccaggtcttgacccactaattctcatttttatcattcgcgaattcagggtcactattttgaatatcatcagaggaaatgagcggggaaatgctgttggcgaagcatactcaacttctcgaataaaatcatcacaacctgcagctgttaatctttctggataa

SEQ ID NO: 316 - DNA, 1026 bp, Caenorhabditis elegans
atgtctgaccgtcattggctcgacatcaccacctactcagaccacattgggtttacgatttccaccatcgccaatttcgttctgatccttctgctagtcttccgaccgaccaaatcatacggttcatacaagtacctgatgatcacattctgcgtgttcagcctcttttacacctccattgaaacttttttgagacctctcatccatatctacgacaatacgatcttcgtgattcagcgcaagagattccagtactccgagggtaccgctagagccatttcatcgacctactgcggctgctacgccatgagcttcaccctgttcgccgtccactttgtctaccgttactatgcggcttgcaaacccgacaacctccgttacttccaaggatgctactttgtcgcatgggtattcggagcaatggcggtggcggcgagctgggggttcgcagcgtttattctgtacccggagaccgagaggaccaggacggcgttgatacacgtcatacaaacatcctatgagctggatcccgagtgggtgggaaatgttccatatagctattggcgcacagaaaacggagtggaatacctgaatcctcgcaacgtcatcgggatctttcaacacggcgtcatcatgatcctctccttcggaacagtcttctactgcggattcaacacttataagactttgaacggaagtctgggggtgtctgaaaaaacaaaagaaatgcacacccaattgttcaaggccttggttctacagactatcatccctactacactaatgtacatcccgacaaccatgctctttgtcaccccattcgttggactcaacatcggctgttacggcaacatcactactgccaccgtccatttgtatcctggaattgacccagtcgttttgatctttataatccgagacttccggcaaacgattttaagaccattcagatgcttctaccgttcaaatagtgtcgaaaacactgccaccataaggcaataccagcagagcagctccaaaggataa

SEQ ID NO: 317 - DNA, 1047 bp, Caenorhabditis elegans
atgtccgatatatactggatacaaattactgaagtttgctccttcgtcggatttatgctctcagttctagggaacagtacacttttagtactgctcagtggaaaatccatagatggaattggcacctatcggtacttgatgatcactttctgcgttttcagtttattatttacgatattagaggattttatcagaccgctgatgcatcactataacaataccataattgttttacaacgcaagcggtttcagttttctgattcaacggctagaatcttgacagtctcttactgcggctgtttcgcgatgtgcttcgtgatgttcgccgttcatttcatctatcgatatctagttgcttgtcacccgacaaaattgcactattttcgacccaaaaatttcattttctggctgtccggcatgttattcatagcaggaagctgggttgcaattgcatatgtcttttttcaagaagacctagaaaccaggacggatttggtatttattttgtcaacttgttataatttaacgccagatgatgtcggacatgtaccgtatgctttttacaaaactcaaggaaatacacgagtaattcgatgggataacatgattggagtaattcatcatatgatagttatgacaatctctataagtgccgttttctactttggcattaaaacctacactcgaataatgagtttcaagggaaaatcccagaaaaccaaggatctccagaatcaatttttcactgctctagttgctcaaaccgtagtccctctgattttcatgtttatcccaaatatggtgctcactacggcagcccttatagatggcacatttggctcatgggccaatattactgtagttatgaatcatttgtatccggctgccgatccattcgttatactgttcattattaaggggttccggaatagtattagaaatgttatatatcgctgcacaaaaacgaaaaaagcatcggttagctcagtggtccgtggtattgaggctcaaagcaagaaacaatctttttctcgagttgatatttaa

SEQ ID NO: 318 - DNA, 1056 bp, Caenorhabditis elegans
atgtccgatatatactggatacaaattactgaagtttgctccttcgtcggatttatgctctcagttctagggaacagtacacttttagtactgctcagtggaaaatccatagatggaattggcacctatcggtacttgatgatcactttctgcgttttcagtttattatttacgatattagaggattttatcagaccgctgatgcatcactataacaataccataattgttttacaacgcaagcggtttcagttttctgattcaacggctagaatcttgacagtctcttactgcggctgtttcgcgatgtgcttcgtgatgttcgccgttcatttcatctatcgatatctagttgcttgtcacccgacaaaattgcactattttcgacccaaaaatttcattttctggctgtccggcatgttattcatagcaggaagctgggttgcaattgcatatgtcttttttcaagaagacctagaaaccaggacggatttggtatttattttgtcaacttgttataatttaacgccagatgatgtcggacatgtaccgtatgctttttacaaaactcaaggaaatacacgagtaattcgatgggataacatgattggagtaattcatcatatgatagttatgacaatctctataagtgccgttttctactttggcattaaaacctacactcgaataatgagtttcaagggaaaatcccagaaaaccaaggatctccagaatcaatttttcactgctctagttgctcaaaccgtagtccctctgattttcatgtttatcccaaatatggtgctcactacggcagcccttatagatggcacatttggctcatgggccaatattactgtagttatgaatcatttgtatccggctgccgatccattcgttatactgttcattattaaggggttccggaatagtattagaagaattccagatgttatatatcgctgcacaaaaacgaaaaaagcatcggttagctcagtggtccgtggtattgaggctcaaagcaagaaacaatctttttctcgagttgatatttaa

SEQ ID NO: 319 - DNA, 1041 bp, Caenorhabditis elegans
atgtctgaatcatacgttttctggatacacgtgacccattttattccaaaacttggattcgttacaacatttatgtctggcctgtgcctactgttcttgaactatttcggtgctcagaaaaatttcggatcttacaagtacctgatcagtgcgttcacaatgctgggaatgatttttgcaactgtagagataattgtgtacccgaatgttcacaactataaagctagctttctattctacagttttgaagaatcttttggtttaagtggatcatggtcgagaaatattccactggccggttacacatttttccactcggcaaccatgtctctattatcagtgcatttcatatatcgatattgggcagtttttgatacgaacaaacttgcctacttcaacggatgctattctcttatttggttcttctattgcgcgtttttcggctttcaatattctcttggaacctacttttttttggcaagagacgaaataactgatgaatatcttcgtgaagatatgcttctcagatataatgcgaatatcagtgagcttccagctatggccatagttgcctacgatcctgtggatggatcagtaagatggagaaatgttatgggaatatttaatatttgttcaattgtcaactttcaatatgctatcatgttctactgtggatggtcaatgcatacaaaaatggaggataaaattaagaatttttccgagactcttcgaaaacatcacaaacagtttttcaaaactctcgtgcttcagataaccactcctacaatcatattattcattcccatcacaattataatatttcttcctctgtttcacctagacgtcagcctcccatctggtgtcatgttatgcagcttcacattgtatcctgctgcagattcatttattgtcatgttcgttgtgtcggagtacaagaatactgtcaaaagaactcgagcggccttttctaagggtttgaaggaaaccatacagtttagagtacaaccatctggaattacaagttctcgtcaaattacttaa

SEQ ID NO: 320 - DNA, 1017 bp, Caenorhabditis elegans
atgtgcataccactggaattccaaatcatccaggttattggattcattttatcggaagtttttcattttaccttgcttttcttgatacacacaagagccactcggcatttcggatcctacaagcttttgatggcttcgttttcgattttctcaattttgtatgcacttgtggaggttttgacacaaccgataatgcacatatcagggactggcctcatgctttatgttggaaccacttttttaccaatttccaaggaatttggtcattttatcgccgcattttactgctctacattcgggatttgcgtactatttttgtcggctcactttttctacagatattcggcggtttgcagtcctcgccttctccgacacttgcacgggccaaaagtgctgcgacttttgatgccggtatttttcctgggcgccctgatgtttctgaatgttacctggtttggagagcctacagaatttaaaatgcactatatgagggagagtttgaagcgagagtatggcgatgatagttttgaagttgggcagatttcttcagttttctatatctacaactccaccggctcactagaatttttctggaaagattgcctaggaatggccgtcgtttatattattctctccatatcaatttccacaataatctacttttccctgaacatattccgaactgtgtatcgccacacaaaacatcgaaaaagcaaaaagaactgggaaattcatcggcagctattccagacgctcatcattcaaaccttgattccaatgtgcattttatttattccaactgggttcttgctaactttgccatttttcgatgtgaaatatgtgggccgcgttacaaatgctccgggagttggtgcaagtttatacccggctctggacgcgttgactgctattttgatgatcagagagtttcgtaccgcttttaaatgtcgctcgcaggctccgattatgaaaatatcttcaattcgagacaccatgttcaccaattttcatagttga

SEQ ID NO: 321 - DNA, 1231 bp, Caenorhabditis elegans
atgtgcataccactggaattccaaatcatccaggttattggattcattttatcggaagtttttcattttaccttgcttttcttgatacacacaagagccactcggcatttcggatcctacaagcttttgatggcttcgttttcgattttctcaattttgtatgcacttgtggaggttttgacacaaccgataatgcacatatcagggactggcctcatgctttatgttggaaccacttttttaccaatttccaaggaatttggtcattttatcgccgcattttactgctctacattcgggatttgcgtactatttttgtcggctcactttttctacagatattcggcggtttgcagtcctcgccttctccgacacttgcacgggccaaaagtgctgcgacttttgatgccggtatttttcctgggcgccctgatgtttctgaatgttacctggtttggagagcctacagaatttaaaatgcactatatgagggagagtttgaagcgagagtatggcgatgatagttttgaagttgggcagatttcttcagttttctatatctacaactccaccggctcactagaatttttctggaaagattgcctaggaatggccgtcgtttatattattctctccatatcaatttccacaataatctacttttccctgaacatattccgaactgtgtatcgccacacaaaacatcgaaaaagcaaaaagaactgggaaattcatcggcagctattccagacgctcatcattcaaaccttgattccaatgtgcattttatttattccaactgggttcttgctaactttgccatttttcgatgtgaaatatgtgggccgcgttacaaatgctccgggagttggtgcaagtttatacccggctctggacgcgttgactgctattttgatgatcagagagtttcgtaccgcttttaaatgttagtgcagcacccgacatttgacgggctccgcggaactcggaaaatgtcgaaaattttttcaggtcgctcgcaggctccgattatgaaaatatcttcaattcgagacaccatgttcaccaattttcatagttgaaagggtgggcgcgccgacccagctttcttgtacaaagttggcattataagaaagcattgcttatcaatttgttgcaacgaacaggtcactatcagtcaaaataaaatcattatttgccatccagctgatatccccctataggagttcgt

SEQ ID NO: 322 - DNA, 1029 bp, Caenorhabditis elegans
atggacaaactcatagtatctcttcaatattctggatttcttggttctatagttttaaacgctcttcttttgcaccttctctttcacaaagcaagcagcagttttgggagatataaaattctgatgatatcattttcgatatttgcaatattctattcaattgtggatgttttaacattaccggtcatatttgcaaaaggaagatcaatatgtgtttgttcaaatggaccattgaaattattcagatcgataggtgttccattgacagctgtctactgtggttcattcggactatgtatttcacttctggctctacacttcttttacagatatattgcagtttgcaagccagagaaaatgtattactttgatgaaaaacacatttgttacactttcgttctctcaatatttatattcgttgcttggaccatcaccacatatttcccaatgctaccagatgaaatgagagaagaatattatagcgatgttctgatggataactttctcacagattcccatgaaacatcatttttagtaatgatgtataaaacacctcccgatcgcccagaaccggtcgagtggatatattcccaattgttagcatgtggatttatgtgttttcaaatgagcacatgtagttttgtgatgctcttctgcggttacaaagctgttgtacagatgaaacattcggaagttcatatgagttcaaaaactagaaacttgagtcgacaattaatgatgacgctcggtgctcaaactcttcttccattcaccactgtctttcttcctgtcggtctcataattgtgttgcctgtgtttggaatagatgttggtgttgccgcaaataaaaccgctgcgtttttgggaatatatcccgctcttgatccaatgatagcaatttttctaattaaggactttcgatattttgtcttttgccgttcagaatcttcgtatgtatcatctgcactttcattaacttcacacccttcgaaagttttcaaaattgtgaaacgtaacaatgcagcttaa

SEQ ID NO: 323 - DNA, 1020 bp, Caenorhabditis elegans
atgaatgtgaaggaagtcattcaaatcatacagtatagcggatttgtttctgctcaaattattaatgtcgttcttctatacttattgtttttcaaagcaaacaaaaaacttggaaaataccgtgttctaatgattgttttctccatttttggtatgatgtactcgttgatcgaggttttgacatttccggttatgttctgtaaggggagatcgttgtctatctgctcggatgggccttttactttaaagaaatcaattggatttccattgatagctgtgtactgtgcctcatttggaatgtgcatatctttattggctcttcatttttactaccgatacattgcagtctgcagacctgacaaacttttctactttgacggaaaccgcatcttatattgcctgtctccgtgctttctgattttcttcgtttggacattaaatgtatttctgtttatgaaaccagaccaagaaaaagaggattattactatgatgttttaatggatggctacggcatagactcccacaaagtttcattcttatcaatgatgtataagtcaccagacactgataccacgccagcccattggaatctttttcaactttttggcctagcaatttgttgtgttattatgacgtcatgcttctcaataatcattttttgtggcttcaaatcttggaaacaaatgaaaaactgcacaactcaaatgagcaagaaaactagagaacttaatcgccagcttttcttaacactcggaatacagacgctgctcccattgataacaatgtatctacctggcggatgtttcattcttctcccggcttttggaatagagcttggagctaatgccaaccaaactggagcgttcattggagtatatcctgctctagatccctttattgcaatatttttaatcaaagacttcagaaactatgttttctgtaaatcactcaaactcagcagaatatcaacagctaccgaaaacactaaaaaatcccaatcaaatatgaatgcattataa

SEQ ID NO: 324 - DNA, 1032 bp, Caenorhabditis elegans
atggaacaaactattcaaataattcaatttggcggatttttcgcatctcagctgactaatggactgctcttgtaccttttgtgcagaaaaacgagtaagcaattcggacggtaccgtgttctaatgatatccttctccttgtcggcaatgatgtattcggttttggattttttgactttaccgatcttcgtttgcaaagaacgatccttctgcattgtctcgagcggcatgtttactcatgacaaatatatcggattcccactcattgcaactaccagtggttgctttggcttgtgcctttctgtgttggctctgcagttcttctacagatacatcgcaatttgcaaaccagaaaaattgcacattttcaatggaaaatcaattttctacacaagctctccgtgttttgtgctcctatttctatgtcttatccaagcatggttctttatgaaacctgtaccggaaactcaacttcattatcagaaaattttccgagaaagtttcgatatggattcttttgacgtagcatttgtggctatgaaatacaagtcatctccgactgaatctatcccggaacattggaatatacaacaagtgtttggctttttattttgtgtagttataatgcagagctgtgtatttgccatattgttctgtggtcttcgcacatttttctacatgaaaaagttcagcttcacaatgagccagaaaactaaggaacttcatcggcaacttttcttcacacttactcttcagaccctactccctggtataactatgttcatcccagtgggaagcctcattgcgttaccattttttggtgtggacttagggcttgaagtcaacaaaattggagcatttctcggagtatatcctgcgttggatccattgattgcaatttttttgatcactgattttcgaaactttgttttatgtcttgaaaaacgcacggcgtacaaaattgccgcagggttgacggggattgagagctctacggcaagacgttcttcaagtatgaatcaattacgataa

SEQ ID NO: 325 - DNA, 1008 bp, Caenorhabditis elegans
atggccgtaaccccactgcttcgtatatgtcaattgtcagcgttttctattgcaacaactgcaaatttattgctcctttatctcataaaagttcgtgccggaaattctttcggaagatacagagttttgatggtttcattttcaatatacgcaattatttatgcatttattgaaattttaacaatgccggttctgcatatccataaatccggagttttgttttatttagacggcgttttaaaatttcaaacgactattggaggcttcatgtcttctttatattgtggctcattcgctttgtgcatttctatgctagccactcattttatctacagatatgtagcagtttgcagacatgggaaattatattactttgatggaattaaaatatataatttatttatacctcctacaattcttttcattgtttggactttgtcaatttatttcaattttggaccaaatcaaattaaaaaggatttctttcgaaatataaccatgcagttgtatgacgaagatattgacaaaatatctttcatgggtccattgtattttacccgtaacgaagatggaagttgtctttttcggttttctgatttactgggagctactattagctgcgtcataatgacaatctgtctgatgacttgtgtaatttgtgcctacaaaacttataagaaattgaatgatttgacaatacaaatgagtgaaagaacaagacatatgaacaagcaactattttggactctcgggctccaaacgattctaccctgtgttacacaatatattcctgtcggcgcaatgttttttcttccattttttgaaattcattttggtaggattggaaacgtcgttggagcagcttgtagtctctaccctgccattgatccaattatcgcgattttcatgattgacaaattccgaaactacgttttgggaaaagaagctcggactgcaccaaagacttccacaatgaacgaagatggaaaatccactgtcgcagaataa

SEQ ID NO: 326 - DNA, 1050 bp, Caenorhabditis elegans
atgtctggatcttatcttttttggattcatgtgacccattttattccaaaacttggatttgttgcaacatttatgtttggcatgtgtctactgtccttgaactatctcggtgctcagaaaaatttcggatcttacaagtacctgatcactgcattcacaatgctgggaatgacttttgcgacagtagaaattatagtgtacccgaatgttcacaactacaaagccagctttctgttctatagttttgaggaatcttttggtttacgtggatcgtggtcaagaaatattcctctggcaatttacacatttttccattccgcaaccatgtctctattatcagtgcaattcatttatcgatattgggcagtttttgacacgaacaaacttgcatacttcgaaggatgcaattctcttttttggtttttctattgcgcattttttggctttcaatatgctcttggtacctactttttcttagcaagagacgaaataacagatgactaccttcgtgaagatatgcttcttagatataatgcgaatataactgagatcccagcaatggcaatagttgcctatgatcctgtggatggatcagtaagatggagaaatgttataggaatattgaacatttgctcaattgtcaactttcaatatggtgtcatgatctactgcggatggtcgatgcacacaaaaatggaagataaaattaagaatttttcggagactcttagaaaactccacaaacagtttttcaagactctggtgctccagataacagctcctacaatcatattattcattcccatcacaattataatatttcttcctctgttcaacttagacgtcagtcttccatctggtgtcatgctatgcagcttcgcattgtatcctcccactgattcattcatcgtcatgttcgttgtgtcggagtatagaagtactgccaaaagaactctagcaactttttcaaacggcatcaaaaaatttaaacagtctagagttggtggaattccatctggaactataagttctcgttacattgcctcatga

SEQ ID NO: 327 - DNA, 1017 bp, Caenorhabditis elegans
atggcggtatctccctatcttcgaatctgccaatttttatgttttttcattgctattatggcgaataccgtactgctgtatttgattaaaattcgagctggagcctcattcggaagatatcgaattatgatgattacattttcaatctatgcgatcatttacgcaacaattgagattttaactctaccagtaatgcatcttcacggatctggaattttgttttatgtgaacagtgttctgaaggatcatatttctgctggagttatcatttcaacaatgtactgtggatcatttgcattctgtatctccatgcttgccactcacttcattttcagatacattgcagtttgcaaaaacaacaaactccactattttgaaggaattaatgtgtacctatggcttatcccaccgttcttctttttcacaatttggggttcatcaatctatattaattttggaccgaatcagatgaagaaggattacttcagaaatgtgactttggaattgtatgacgaagatattgacaaaattgcttttatcgctcctttgtattttactcgaggggaagatgggagtcgtcagttcaattttcctgatttgtttggagcatttttgagctgcaatattatgagtatttgttttggaacatgtattgtttgtgcctataaaacctacaagaagctcaatgatttttcaattcaaatgagcaaaagaacaagagcactcaataagcaattatttctgactcttggacttcaaactctcctaccatgctttactcaatatataccagtcgggcttatttttattcttccgctttttgaagttgaagttggaaaagctggaaatcttgttggagtgacatgttgtttataccctgccatggatccattgattgcaattttcatgatcgatcggttccgtaactttatttttagaaaagagtcaccatcgacaacgaaaagctcaaaaatttctgctatcaattcggaagggttttcatcaactggaaaatag

SEQ ID NO: 328 - DNA, 1008 bp, Caenorhabditis elegans
atgatgctttatcgagtaatccattacattcagtttgctgcttttgctgtttcccaatgtaccaatggacttttgttgtacctaatatggacaaaggctcggaaagttttaggtgcctatagctacctgatgcttgccttttctctttatgctatactatacaattatgtcgatattataactctgccattggtggtgatcgaaaaacagatgtacgtggtagtcaatcatggacctattcggaatgttccaatctttggtttcctattcacatgcctgttcggatcatcctttggtttgtgtatttctctactttctacacaattcttttatagatatcttgcagtttgtagaccaaagtctttgcactatttagaaggccgccgattggctttgatatttatccctgcgatttttgtctccgtcatttggtttttcttttgcttctttggattggatataactgtcgaaaaacaagaaatgttgaaagaaccattcatggaattttacaacgaggattcaaatacgatgtcatttgttagtggtcttttttggagtcttgatgaaaatggaacgaagcattggaatatgaaagattgtattggatcactcggtttagctgcgttgatgattgtttgctgtcttaccattgttttttgtggcgtaaaaacatacaaaaagatgaacgattctggaaattcacttagcaaccggacaaaagagctcaatagacaattatttgtcacattgagtttgcagactctcctcccattcatgctgatgtatggacctgttggacttctgttcatcttcccgctgtttcaaattaaatttgatattttgtcaagctcagcagccgcctcaactgctatctaccctgccgtcgaaccattaatcgcaattttttgcatcaaaacttttagaaaagcactgtgttttaatcaatgtatcaggcaaactgcgagaataaccagcactgctgcctcaaccgcagcaaaaagcaattga

SEQ ID NO: 329 - DNA, 987 bp, Caenorhabditis elegans
atgtaccaagtggttcatttcgtccaatattttggatttttcttctcacaattcaccaactttattctactttatcttcttcgggcaaaggctggaaaacatttaggcccttttcgctatctcatgataactttttcgctgtactcggttgtctacaactacgtggatattatcactcatccgttagttctcatcgagaagcaagtcttcgttgtgatcaatcatggaccatttcgctacacgcctgggttcggatatgtgcttgtttgcatttttggcgcatcgtttggtttatgcatctccctcctctgtacacagtacatgttccggtacatcgttatttgccaccaaaaataccttcatttaattgagggaaaacgacttgctttactgtttctcttccccactacaatttccatcacttggttcactttctgttatttcggcttgactataacctctgaaaaacgagaagctcttagaattccattccaagaaaactatggggaagattcggatgttctcatgtttgccgctggccaatactggattttcggtgcaaatggtgaaaagatatggtgcttacgagattattttgcgactcttgggcttgttggattaatgggaatttgctgctttgtgatcattttttgtggactgaagacgttcaggaaaatgatagaggttcagggctcaatgagcaagcaaacagcggcgctgaacaaacaactttttctgacgttaacgttacagactctactcccttttatcttaatgtacggccccgttggtcttatattctttgcgccacttttcgaatggaaccttcaacttttcgtcagctcagccggagccacgacagctatttacccggcttttgagccattaattgttattttctgtattagtctgttccgcaacgcagtttttccgtgcacacggtcaaaagtcaccacttcttcgggagcgttttcctctgctctttaa

SEQ ID NO: 330 - DNA, 1089 bp, Caenorhabditis elegans
atggttttgtactcctcaaaaactgaaccattcttgtcaacaagttccgacatggtttgcgcaaccgaatttgttcgttatcttcacctgatccattacattggatttgttggagctcaatcgttgaatgctgttcttgttttcctgatcataactaaatcggaaaacttgctgggaaactatcgatacgcaatgtttgtgttcacattatgttcaatggtctattcaatggtagagattttggttcaacctgttggtcatatgaaaggctcgatgtttgtcgtcttcatgcatagcagtattttaaatgctacaaatcctctagcagaatttcttacttgtcttcattgtgtcttatctggatttgttgcttcacttctggcttgtcaattcatattccgatacttggcagtttgcagaacacatttcctcgtacacctccaaggcataaacctttgtttgttattcattccttcaattttcgtattcgctgtgtggcatttcggttttttccatggaatgcctaacacattagaaaaacaaatatttcttcgagaagaattacaaacttgtttcaatgtaaataccacagtaaatccatttgttggacctatgtactggacaaaaggagctgatggacaaattcattggaatatttttgaattaatatctgcattgagctgctttgctgtactgattatttgtttctttacgatcgtcttctgtgcgtatagcatatttatgaaaatgagcaactcaatacatcatttgagcgcaaaaactttagatctcaacaagcaattatttagaatgctctgtattcagacagttattccaatgatcacaatgtatttccctgtcgctttatttgtgacgcttccgatgtttgggaaagatattccttatttgggaaatatgacaagtagtagtctagccatttacccaattatcgagccaattattgcaatgacttgcgttgcaagtttcagaaaagctataaaaggatcaattcgttgctcagttagtcgatcaactcaatttgcaattcaccctgcttcatcacctagattgaccgatcaaaaacaatga

SEQ ID NO: 331 - DNA, 1041 bp, Caenorhabditis elegans
atgagtaactttgctgtacaccttgtgcagtatgttgggttttttttagcacaattcacaaatgcattgcttttatgtataattgcaaacaaagcaaaaaaattatttggcggatatcgttacgtcatgattgtttttgtcatttattcacttatatattcatggatagagattgctgcaacacctcttatgtatggacaccggtccatgattattataatggtgggcagcagtctgagatatgaggatttggctgggacatttatcatatgtctgttctgtgcggcgtattctttgatgactgcactattggcaacacagttcttctatagatacattgtagtttgcagaccacagttccttcatcacattaaaggctacaaactttgtttcatattcttaccaggtgtcgtcatattctttttatggtatttaaacgttcattttggaatgaagaaaactctagaaaaagcaaaattttcacaagaagttattttgaaaaattgcgaagaagatacattccaaatcgtattcgttgcattgcaatattgggaagatgatctcaatggtaaatcacattttcgaataattgattttttgagttatttgggatttcttttaatgattgcattatgctttctcactattattttttgtgctctgaaaatatacttcaaattaaaagaagatatacattcaatgagtgaaaggaccaaagaacttaatcggcagctaatgatgactttgacatttcaaaccatttttccattcttcacaatgtacagcacagttggagcaattctaactcttcccatatttgaaatagaattgggaaaacttgcgagtgttactggaatgctatctggcatttacccagcaattgagcctgtttttgcaatattttttgtaaaggagttccgaaattttgtgctatgtaagaaacattttgttgcgaatgttatcccattacaacatttgcctgttcctcgaaactctttgatgacggcacatgcttcattgcaaaatttgtcaattccttga

SEQ ID NO: 332 - DNA, 1032 bp, Caenorhabditis elegans
atgatcaactggtttgaaatcaataaaatagtttcccaatttggattctttattacaacgtcatcgcagcttactgttattttcctaacgttgttattcgtgagaaaagatttaggagcttacaagcatctggtagtcttattctcaactgttggagttttatttgcaattttggagttcttgctatatccaggtcttcacttgcataatgccggatacatagtctatatcaacaatcgtccatttgatgcttcaaagccacttctcacactaattttagcagtttactgtagtttatactgcactgcaatatctcttctagctgtacaatttgtctaccgttacattgcagtgttttatccgattcacttaaaatattttgacaagtggtatttgttgatttgggtttgttacgcagtatggtttgagtttcaatggggaggtggaatcttcaagtttgatgaagtggatgattattcggaggagtacacgagacaaacaatgatggattattaccaaattgatgtctcggaagttccatgtttggtaaatgttgtttatcaaacaattcccaactctacagacacattcatccgctggaacaacgcattcaacacattaaacatgacatttgtcggcacacttcaatactctatcatgatattctgcggctacaaattgtattataaaatggaagagaagctcagcatttgttcagacgattctcgaaaacttcatcgtcaaattgtcaaaactcttctgcttcagataataacaccaaccatcgtgatgtactcgccagtgttcttagtgatttacctaccacttttaaatctggatttcagcctgccaatgggaatatttttgggcattttttctctttatccggctctggatgcattcatattgatgtatgttgtcacagactacaggagagctctcaaagatgtgttaaaagttctcaatccattcaaaaaagtaaccgttagtactttggtggtaattcctgggcaagcacaatttataccataa

SEQ ID NO: 333 - DNA, 1005 bp, Caenorhabditis elegans
atgatcggtctacatattttccactacgccggctttttcggagcacaaatcttcaatactgttctggcaatattaattgtgaaaagagctggaaaactgtttggtagttaccgtcatgttatgtttgtattcacattttgttcgatgttgtactctgcagtagagataattgcacagccggtactatacatgaaaggtccaatgtttgtcgtgtttcttgataataacgttttttctcaaggcattggaaatgtagttgcttgtcttcattgtggtacctttggatttttgatttctgtatttgcggcacagtttttctacagatacattgcattgtgcagacaaagtctgttatcttatttcgatggatataaaatatttttgatcttcattccatgcgtaattacatacattctctggtttgaacttgtcgtttggggaatgtctgcgactatggaaaaacgaatctatttgaaagatgattttaaaaatatgtatgaatcagattcaatgatgatatcttttattgctccgttgtactggaacaatggaccaaatagagagaaagtttggagatttaaagatgcagcctctgcactagtctgtactggaattattggatcattaacaactttaatttgcttcttcgcgttacgaatttatctaaaaatgcaaaaagaaaaaggtcatatgagtaaaagaactctggaattgaacaggcagctttatataatgttatcaatccagactattgtcccatttataacaatgtacatcccagtgggtcttttcattgttctcccattttttgatatgggattaggtgcgtatgtgaattatcccagtgccagtatgtctttgtatcctgcaattgaaccattaattgcaatttattgtataaaagacttcagaaagactatagctaatttcttccggagagttcgtgttggtccaaatggcataagtgtgtacagtactagtggaacacagatggcaatcaaataa

SEQ ID NO: 334 - DNA, 1005 bp, Caenorhabditis elegans
atggaactaacattgaaattgtgtcttcatatagcccaatatgcaggtttcatagtcgggcaacttaccaattcgtgtcttttgtttcttatttttactagagctgagagattatttggaagttatcgacatgtgatggctgtttttgcgttgttttctttggtttatacttggatcgagtttatagcacagccggtgatgcacataaaacaatcaatgttcattgtaatgctagatagtcctttcacatttgacgtttcgaccgggaatgaaattacttgtttatactgctcatcatttgctctttgcatttcacttttggctgctcagttttattaccgatatattgctctttgccaaccagaaacccttgagaaaataaaaggatggaatctgaccttattattcattccttgtattgtttgctttgttggttgcgttacttgcgtctattttggaatgcacaatactgtggaaaaacaaaaatttatgagagacgtgatgtttgagaactatgatgttgatttgggcagggaatcatttatcgcagctttttattggtcatatgataaaaatgggtctcgaattttccgctttcgggataccattgcggcttctggatgtatattagtggcatgcttctccacaatactgtattgtgctttcaaaatctacatcagactcaaaagtgctcaagcattgatgagtactaaaacgagagaacttaaccgacagctgtttatcactctcacttttcagacactttttccatttttcatgatgtattgccctgttggttctttgatttcttttccatttcttgaaattgaagttgggaaatttggtaattacactggcgcagctgccggaatttacccagctttagaacctcttattgcaattttctgtatcaaagatttcagaagagaagtactatgtcaacggaaaaaagttcgaactgaagtaaaatccagatcaggaatcccatctacttctttcatataa

SEQ ID NO: 335 - DNA, 1011 bp, Caenorhabditis elegans
atggggctgactcttaaattgtgtcttcatatagcccaatatgcaggtttcatagttgggcaacttaccaactcgtgtcttttgtttctcattcttactagagctgagagattatttggaagttatcgacatgtgatggctgtttttgcattttattctttggtctatacgtggattgagtttatcgcacaacccgtaatgcacataaaacaatcaatgttcattgtaatgctagatggtccttacacctttgaaattgctgtcggaaatgaaatcacgtgtctttactgctcagcatttgctctgtgtatttcacttttggccgctcagttttactaccgttacattgcagtttgcaaatcagaagatcttcagaaaataagaggatggaaattaggcttaatatttattccttgcatcgtatgctttgttctttggtttgcttgcgtctattttggaatgcacaatacgatagaaaaacaacaatttatgagagatgtaatgtttgaaaactatgaagttgatataagccgggaatcttttatcgcaccgttatactggtcttataacaaagatggtgagcgagttctacgatttcgtgatataataggatcttccggatgtacattcatattggtaacatgcttctccacaatactgtattgcgctttcaaaatctactttagactcaaaagtgctcaagcattgatgagtgctaaaacacgagaacttaatcggcagctgtttatcactctcacttttcagacacttctcccatttttcatgatgtattgccctgttggtacatttattactctaccattttttgaaattgaagttggtcaacttggaaactatgttggagcagccgctggaacatatccggctattgaaccagtcattgcaattttctgtatcaaggattttaggaaaactgtgctttgccagcgaagaaagaatcgaacaggtgctaagtccagctctggaatccctactacgtcatttcattga

SEQ ID NO: 336 - DNA, 1005 bp, Caenorhabditis elegans
atgctttatctccacattattcaatatgttgggtttatcggtgcacaaatctccaattccgttttgatttatttgattgtgacaagagcgaaaaaactatttggaacttatcgaaatgtcatgttcagttttgcagtgtacttttcagtttacgcttggattgaaatactcgcacaacctataatccatatcaaaagtccggcttgcgttgttttcatggaaagccctctaaagtactatccagtacttggctacaatatcacttgtttgtactgtggatcctttgcacttgtcatttccctattagctgcccagttttgttatcgatattttgcagtttgtcgaaatactcaactggctaattatgaatctcggatagttgctggaattttcgttccttgtctgatttgttttatcgcttggtatgcttttgtgtattttggaatgcataacagtattgagaagcaattgtatttaaaggatgagctcaaaaccgtctacaatgaagattccacaaaagtagcgtttatcgctgttatgtattggacagttggtgaaaatggagaaaaactatggagattttgggatcttatgcttcttgtagcctgtattttaactataggaggatgttttgctataattgtattttgtgctgcaaaaatcttcttaaaaatgaaaagtgcagggaataatatgagcaaaagatcactagagcttaatcgacaacttcttgtcgctctaacatttcagacagtacttcccttattcatgatgtatattcctgtcagtttagaaatcacaatgccattgcttgaaattgaaactggtcatttagctaatttcactgctggaagtctagcagtttatccttcgttggagccacttattgcaattttctgtataagagaattcaagaaagctgtattttgctgcattcaaccaaaaaagacttccaccgttcagttttctgcgtattatacatcaaaggacaagacaaagatatga

SEQ ID NO: 337 - DNA, 993 bp, Caenorhabditis elegans
atgctttggctgcatatcatacaatattctgggttttttatggctcaagtgaccaatgctcttttggtttatctcatttggacaaaagctgagaagctttttggaacgtaccgtcacgtgatgtgtacatttgcactgtattccttggtttacgcatggatagaggttctaactcaacctgtcatgcatataaaaggaccaatatttattgtaattatggatagtccgttgaaatatcaaaaatggattggtaatgatttaacatgcttgtactgtggatcttttgctctggtgatttctctcctggcagctcaatttttctatcgttatgtagccatgtgcagatcgaattttctgcaaaacattgaaggcatcaagttgacatttattttcataccatgcctagtatgctttgttttgtggtttgaatttgtttattggggaatgtcaaatactgttgagaaacagttgtacatgagagaagaaatagaagcttattacaatgaagattctacgaaagtctcgtttattgcaccgatgtactggtcggttggaacaaatggtgagaagatttggaagttttgggaaattatgtcttctgtggaatgtgtttgtataattgctgtttgtttttcaacaattttgttttgcgcatcaaatatttattttacaatgaaaagtgccagtggacatatgagccgaaaaactttggaactaaatcgccaactgtttatcactcttacatttcaaacaattctaccttttgtaatgatgtatagtcctgttggattattgatcgttttgccattattcgaggtctacgttggaagcattgcgaattttgttggtgcaagtctagctgtctatccatcacttgaaccgttgattgcgatgttttgtattaaggaattcaggaaaactgttacatgtccctcacttcgaaaggtgactccagcaactgtctcttatactaccagttcacgtgcagtttga

SEQ ID NO: 338 - DNA, 1005 bp, Caenorhabditis elegans
atgcctctttggctccacgtaatccaacatgctggtttctttttcgctcagatcactaatggaatattagtatatttgatcgcaacaaaagctcaaaaactatttggaacatatcgtcatctaatgtgtgcttttgcggtcttctccctaatttatgcctgggtcgaagtgttcactcaaccggttatgcacataaaaggtccagtgttcatagtcttcatggatagccctttgaaatatcaagcaggaattggaaattttgttacatgcctctattgcggatcgtttgctcttgtgatctcacttcttgcggctcaattttcctacagatttattgtcgtttgcagaccagagtttttgccaaaactcgatgggttcaagctagttataatattcattccatgcatgtttttcttcattctctggtttgaactggtttattggggtatggcaaataccaaggagaaacaggaatatatgagagaagaactggaaacattttacgaagaagattcgagaaaagtttgttttattgcgccaatgtattggtcgattgggaaaaatggagagaaaatttggaatttttttgagattgggctagcatttggatgtgtgatgataattgttgtctgcttcacgacaattctattctgctcaataaacatttattatttcatgacaagcatccagtgtcatatgagcaaaagaacattggaactcaatcaccaacttttcgtcaccctcagctttcagactcttttaccatttgtcatgatgtacagtcctgtcggattgttgttttgccttccactatttgaagtttacgggggcgatattgcaaattacgtgggcgccactttagctctctacccggctttggagccactgattgcgattttcactatcaatgagttcagaaggacattcatgaatcttcaccgaaagaaagtgcaaacaacagtgacagttcctaccttgacaccaacaatgggagttgttgattga

SEQ ID NO: 339 - DNA, 1023 bp, Caenorhabditis elegans
atggccgcgttcgcaataatcaaatcatttgtacaatttgtcactgtttcattctcccttgttataaattcaatattaatttatctcgtcatcacaaaatcctcgaaaaaattgggaaactatcggcatctaatgtgttatttttccttgttctcaatggtgtatgcagtattggattggattgttcaaccgtttattcacagccatggagccagtttctcaatgatcatggatttgagagaaagtgcattgaacaagaaagttgcatttttctttgttgcttcacttgccggatgttttggagtctccatttatgcgattgcaatcaactttattttcagatattttgcattacaaagagaaggccgacttcgatattttgccggaaaacgactaatactttggttttgtattccgttattcggagggctctcctgggttttcttgtgctggtgttcaatggctccagatccagaattcactaactacctgagagacagtatcagagcaaattatgatctggacgctgattttataacatatacaggatcatatttctatcgatttgaaagagatggaagcgtgaaatggagcatcgagaattcacttggagcacttggattgaatgttttaatgatcatacccttcttcatcatattgatattcgggtacagaagttataagaaaatttcaaaattgatggctcagggagaatgtgattacacaaaacggcttcaaatgcaactgtacaaagcattagtagctcagacaataatcccgatggttctcttatctttcccaatcggaatattattttctgctcctttacttcatttggatattgaaaatggtagtattattgtaacattcttttattccctatacccagcaattgatcctattccaattattttgttcatcgatgactttagaaatgcctttttcggtgtttttcaaagaagaccatctaaaaatcaagttgcttcagttgtctctgtggatgctactgtagacgtttcatga

SEQ ID NO: 340 - DNA, 1023 bp, Caenorhabditis elegans
atgggaacattttcccttataaaatcaataactcagccaattgctgtagtactttctgttttggtaaattccgttctcattctactggttgttacaaattccccacggaaaatgggaagctataaatatttgctaatatacttctcagctctgacaattgtatatgcagcaaatgattttgtatcagcaccgtacatgtttaatgatgattcaacagtagttgttctcgtagatttgaagaataatttgctaaaagatcgtccagatttattgttgctcgccgttgtttccggagtttcatgttttggaataagtctttacgctattgcaatcaacttcatgtaccgctattttgcagttcaaagagaaggccgcctccgatacttttcaggatgtcgccttgttttctggatttctttgtctatcattggtggaatcatgacagggcttaccttctatgccataggttctcgtcaagaaatttcacatggtttgagagagaatttggaaacgatgtatgatttggatatgcatcgaacacaatattgggtatttttgtattggcaacccaaagatggaaatcaagatttgacagcaaaagatattatggcaaatttggggcttaccacatcaatggtaattcctattcttctcatcgtctttttcggaacaaagacttatcgaaaagtcaagaatctgacaactcatggaaaaagtgaatactcaaagcggcttcaaatgcaactttacaaagctcttgtcgcacagataattattccatctgttttcctgtttctcccgactttattaattgctgcaggtccacttttcaagcttaatattccatgggctagtcttccattatctattttattttcaatgttctcagttatggattcaattccaattatttttctcgtggatgagtatagaaatgcactttttgagtttttcggaggcttctgttgtgtaaatgaagttgttcccgcttcagctcgtgataccagtagcacccagttgtga

SEQ ID NO: 341 - DNA, 1011 bp, Caenorhabditis elegans
atgggtatatttgtgataataaagttaatagtgaaagattcttgtacacttattgctattctaacaaactctcttctcatctacctagctctcacaaaatcaccaccaaaaatgggaaattacaaatatttattgtgttatttttctgtgctttcaataacctatgtaacactggatttccttgcggcaccgtatgtgtatacgtttgaagctagtagtgtactacttatggatttgaggaataccatttttactgaataccctgcagttgcgtttttaataattgtttctgcatgtgggtgttttggagcaacactggcagcaattgcaatcaatttcatttatagattgtgggcgttggaaagaaaaggccggctccgatattttgaagggaaacttttaattgcttggattttactgtcactgtttactggattcctttcagcttgcgtattttggaccacagggcctaatgatcaaataaataactacattagacataatctcaaagaggaatacgatctggatgttgatcaaacatcttacattgcatttgtgtactggaaatctgaaaatagagtagattatttgaacatcctggatacgagtaagctcatgatcgtgaacatcattatgataattccgttttcgatcatattttattgtggtttgaagagttattatcaaatcaaagagttgatttcaaaaggggaaaatgaattctctcggcgtctgcaaatgcaattatacaaagcattagttgctcaaactttcattccaacacttttcctatttattcctgtgagtttgttccttgttggtccattaattggtatcaatgtcacatgggctctccgagcagttacagttttcttttcaatttatttagccactgaatccttgcccattatctttttggtagatgattacagaacagccattgcaaatattttccgccgatgtctctcaaaacctcaagtggcaactgtttccgtccatgattctgattga

SEQ ID NO: 342 - DNA, 1017 bp, Caenorhabditis elegans
atgaatacagctataaaaaatgatgttcaaaacgttgcgttttcgatggcattcatcacgaattgcacactgattttattgattttttcaagatctcctttcaaactggggacttataagtacctgatggtttactttgcctcagtttctttgttttattcatttcttgaatgtttactgaatccgttattactatcatataaagattgctttcaagtgatcgtgaaactacaattctcaaacccaaaagtcgatcgttatattttatattacggttgtggaatctgcggagttctgatgccaatgttcgttgttcactttatcttccgatattttgcaatgcaaagaaaagggaatctgaaatattttgaaggatggtactttctatattggttgtctgtaccgcttattagtggattcttgtgggctcagacactttttgcgtttttatacgaagatactgaaagctcggattatatgagagaaatattacttgaaaattatggtctaaatatctctgatataacctatgtgggagttttatactacaaaaagtcaatttccggtagcggcactgaaccaaattttactggacttcaaggtgtttgtgttttgggtacaattatgacagtatgcttctgcttcattatttacttcggtacattgacctacaaaagaatcatgcatttgatattggaaggaagatcagaatatacgagaagacttcaaaaacaattgtatcaagcacttgttattcagacaataattcccatattctttttgattctaccacttaccatatacttctactctccgttattccattttggtaatcaaacgattggtgactggactgctttgagtacagccatctacccgattattgacccgctacctgtcatttttgtcattgacaattatagactcgcagttttagaatttttcggatgcatcaaaccacaaagaacagtttctataaatgtgacttcaagtagcaatgcggcagtggagaattaa

SEQ ID NO: 343 - DNA, 1044 bp, Caenorhabditis elegans
atgaagaaagaaacgacattcgacgcgatgaaggcaacggttcagaggatttcttttgccttctcgtgtttttcgaatataattttgattttactgatatgcacaaactcaccaaaaaaaattggctcctacaagtacttgatgatttatttctgcgtttttgcaatctttttctcagttctggatattgttatacaaccctacattctctctgctggacctggttttattgtcatcacggaaatcaaagacacttttttgggcccgtttggtgagacatgtttcttgagttcaatttgtggatgctttggtgtcattctagcgactattgccattcacttcatttaccgatattttgctctggaaagaaaaggaaaactgaaatattttcaaggaggatatctagttgtgtggctgttcgtaccactttttgtgggtaccgtctggacgattgtgactgtttatttttgtgctccaaacgatatcacattggaatactcaagaacattaatgaaagatcattatgaaattgatttggaaaatgtgacatacatcggatcaatatatttcgtaaaagatgcaaatggaaagtctgttatgaacaagttcgctctgctcggaatggctattttattcagtattatgggagtctctctttccattcttgcgtattttgcaacaaaatgctacactcgaatcaaaaaactaatatacgagggtgaatcttcatataccagaaacctacaaaaacagctttacaaggctcttgttgctcaagcttccatcccaatgttctttattttcacaccaattggattgtatttaacacttccacttgttggaattgaattggaaattagtggagaaattgcaacatttgtgtatgcattgtatccggcactcgacccgttacccattatatttatcattcataattatcgcgatgcagtgttggagttccttggctgttgcaatgtaaataaccgaattggagcagaagatgaaccaacgagtgtgacacgacatgtttctaattgtagttag

SEQ ID NO: 344 - DNA, 1029 bp, Caenorhabditis elegans
atggccacctacgaagagctcaaaaacgttgttcaatggacttcatttgtattttcaatatgcttgaactccttgttaatctacctcattcttacaaaatctccgaagaaaatgggaaactatcgatatttgatgatatatttctcctgcttcgctatgttcttttcaacttgtgatgtaattgttggaccgtttattcacagctttcaaaaaagcttctgcgtgctggctgatcgaacaaattggcttctcggtgaaaccacacaatttgcattaatttgcgtgttgtgtgggtgcttcggagttacaataacattttttgtgatacattttgtttttcgttattttgcttctgaacgacaaggccgcctcgcctactttcacggctggtattttgtagtttggctgacaattccagtgtttttcggtattatctggggaggcactgtcgcctattttttatctccaactcaagaaacaacggattatgtcagagaaagcatcatgagcaattataatttgagcatggaaaatgtgacatatgtcggagcactatattggagtcagaggggaaatgggaaggaggaaattgtgatgtctactttgattgctactattgtttttacagcaatgattacgtcatcattctcagttgtctgttactatggctacttgagctataaaaggataacctcactgatagatgaaggacaatcggagtttaccaggaatttacaaatacaattatataaggctttggttgttcaggcaataattccaatagtgctgatgtatcttcccgtcggcagttacctagttcttccggcatttggtatcaatatatcaccattcagcaagcttgtaacattcctgtatgctgcctatccagctgttgatccacttccattatttcttatcattgatcattaccgattggcgttaacagactacttctattgtttctcttcaaacaaaaatcgtgtgaatgctagcgaggcggaaatatcacggaatcaagcaacaatttaa

SEQ ID NO: 345 - DNA, 1008 bp, Caenorhabditis elegans
atgacaaactacgagatacttaaaagtgctgttcaatggatctcattcgttttctcgatttgcttcaattcaattttgatttttctcataattacgcagtctccaaagaaaatgggaaactatcgatatttgatgatctatttttcctgtttcgcaatgtttttctcaactatcgatgtcatagttgctccgttcatacatacgcatggaacaagtgcgactgtcttgatgaggaggagtgattcggatacaattgtaaatctacaatatgtacttttgatcctcttgtgctcatgttttggagtgactataaccttcttcgcaattcacttcgtcttcagatactttgccctggaaagaaaaggcagaatctcatattttgatggtccccgtttaatcgtttggattgctgttccaatgttttttggcattatatggggaaccacggttctattttttgcacttcccactgatgagactactgaactcattagagaaagcgttatgaaacattacaatctggaaatggaagatgtgatctatgtaggagcgtcttattatcggagaaaaagcgacggaacattggaaatgatagtttctagttttattgccgcttctattttctttacgatgatgggaacatcattttccgttgtatgttattacggtgtgttgagctaccgaagaatcgcaaatttgcagaacgaaggagaatctgaattcacgaaaaatttacaaaaacagttactaaaagctctctttctacaggcgctcattccaattcttttgatgtatttaccagttggaacatatatgactctacctgcattaaatttggattctgaagaattcagtaaatttgttactcttctctatgctatatacccagcaattgatccattacccttgttcttcgtaattgataactatcgaattgcgttgaaaggatactttcttgggtgtccaggaaatcaaaacagggtctcagtggctggatcggataattaa

SEQ ID NO: 346 - DNA, 1029 bp, Caenorhabditis elegans
atgcgaatttcgaacaatttaaacctcctccttcaatgttcttcactcatttgtgcaatcgttttcaactcactactgatctacttgataatcacaaaatctccgaagaaaatgggaaattacaaggcactcatgatatatttctcaacgttctctatggtttttgcagtgattgatatgattgtgcaaccgttcatccacagttacggatcatgtttcttcatgataatgagcatcaaagactggccgtttacagtggagatggctcagatagctttgagcatcctatgtggttgtgggggtgtgacccctttcctgattgcaattcatttcatttatagattttttgctttggagagaaaaggaaacctaaaatatttctccggaacctacttgtttatgtggttcttgattccaatcgctggcggtattaattggtttcatctttcttggttctactatagaagaaatgataaaacaacagaatatatcaaggaagcagtattggaaaactttggtctccacatgaatgagaccgtctactctgcagcattattttacccggcagatgaacatggagttcctaatttggatatcaagatttttatcagttatgtcatcctctctttcagtatggtaattccattcgcagtaatgcttgttgccggggtgaagagccattcacaaatcaaaaaattgattgaacaaggagaatgtgactacacaaaacgactacagttgcagctgtacaaggcattactggtgcagacatttctcccaatcttcttgttcttcatgccaatgggagcattgttcagtgctccactttttcatattgacatcggaagttggtcatatctcactacatacctgtatgctttgtatccagcagtcgatccacttccaattatgtttatagtacaagaatatcgaaatgcgtttattgaactattcgactgcttccgatgttctccaccttctcgaatagaagattcgtcgacaatcaaaagagattcagaaactgtatag

SEQ ID NO: 347 - DNA, 1023 bp, Caenorhabditis elegans
atgctcttttcaactctgaaatttgcaattcaacttttttcgttcatttgctccttatttttcaacataattttgatctatctcatcctgacaaaatctccaaaaaaaatggggacatataagtatttgttagtatatttctgctgtttctctatgttgtattcaatacttgatattattgtgggaccggttatccatagccatggctcttcgtttttcatgatgatgaaattaggaattttgaagaatcatccagaagttggatttttattagtttctctgctatgtggctgttttgctgtatcaataaccactataagcatacaatttgttttcagatatttcgcaatggaaagaaaaggacggatatcatatttccgcggaaaatacttgattatttggttcctagtcccactgatctctggaacaatttggattcttcaagattgggttttcctacatccaaatgcaaaaatgggcgaatatataaatgaaacagtatttattaattacggtgtcaacgtcaccgatataacctattgtggtacatttttctatccgaaaaacgatcaaggagtgccaagtctagattattttcaatttttcgggtttttggggttttgtgtgattatgggtaccacatttctaatcgttgtgatatttggtataaaaagctacaaactggtccgtgaacttccgaaacatggagaatcagagtacacctacaaactgcaatcgcaacttttcaaggccttggtggtacaggctttcattccaataacattcctatttatcccaattggcctcgtcttcatagcacctctcctacattttgatatcgaaccggctagtttcttggtcactatatttttttcaatatatccagcagttgatccacttcctattttgctcattgtagcggagtatcgagagggattgtcagagcttatctacaaaacaattggaaaacgaagcatccaaattagttcctacaccgatccccaaataacttcaatttcttaa

SEQ ID NO: 348 - DNA, 1026 bp, Caenorhabditis elegans
atgctattcgcagctatcaaattcacaattcaactggtgtcattcatcgtttcaataatcttcaacttcacactgatctacctgattttaacaaggtctccaaagaaaatgggaacctataagtatttgttgatatacttctgctgtttctccatcttatattcaattctggatattatcgtggaaccgttcattcaaagccatggttcgtgtttcttcatgatgatgaacttgggaagttggaagtcttatccagaagttggatttttgttcgttacaattttgtgtggatgttttgctgtttcaataactaccataagcatacagtttgtgttcagatattttgcattggaaagaaaaggccgaataacctactttcgaggacattacctcattgtctggttcatagttccattggtttcagcgtccatttggatcactcaactttgggtatttcagcatccaaactctgttacttcggcgtatttaagtgaaacagtgtttgtcaattatggtatgaatatatccgatatcacatacactggatccctgttctacccaccagatgaacacggagttccccatctggatttgatgcaacttttctcttatttgggattttgtgttactatgggcacaacattttccacggtggtggtgtttggaatgaaaagctacaaattggtctgcgaactaccccagcttggagaatctgagtacacttacaaactacagtcacagcttttcagagcgttagtggttcaggcattcatcccaataacattcctatttcttccaattggaatacttttcacagcacctcttcttcattttgatatcgaaccggctagtttcttggtcactatattctattcaatatatccagctgttgatccacttcctattatttttatagtcgtggattatagagatggattggttgaactcgtcggacatttcctctgtaaaaagaataaccaagtgaacacgtcgtacactgatcaacaagttgcttccatttcatga

SEQ ID NO: 349 - DNA, 1041 bp, Caenorhabditis elegans
atggaaatcaaagaatttgaatctctgaaaacactgattcaactgatttcttactgtttcgctctcacttcaaatactcttctcatctttttaattgtcacaaaatcaccaaaaaaaatgggaacttatcgaagtctcatgtgctacttctgcatcatttccttgattttcacaactttggatgtcattgtgaagcctaacatctacagccgagaaagtgcatttttcatgatgatggacctcagaaatcgaatgttgccgagatatattgaagaatgcttgatgagtgttctttgtggatgctgtggaatggctatttatggaattgcaatccatttcgtctatcggtattttgcattggagagacaaggccgtcttcgttttttcaaaggagcttatcaaatcttctggttttttattccaatattcggctgccttaactggacattcatagctggctacttttttgctatgaatccaatttctacaggatacatcgcgccaatgattgaggaaatgtacaatatctcaataaatgatgcagcgtactctgcagcagtcttctggccacccaacgagcagggagtcgtggaatttcattggagatcaggacttgggttgatcaatttggtgacttctatgtcattgtcattgtcagtggtgatatatactggagtgaagagtttgaagaaaatcaaacaattattgggaagattggaatcaaagttttcgaaaaacttgcaaatgcaattgtacaaagcgttggtggcacagaccctgatcccagtgcttttcattttcatcccatttggtatcctcttcacttgtcctttatttctaatcgattgtgaatttctatcagcaccaattacagtaatctatgcagtataccctgctctggatcctctgccatgtttattttttgtcgacaattacagaaattttattgcagggttattttcaaaaaataagaagaaaatcgcaaaagtttctgtggtgacagatgattgtatctcgaagaacatttattcgcagcgataa

SEQ ID NO: 350 - DNA, 1029 bp, Caenorhabditis elegans
atgagcccaacgacttttaagactttgaagacttccacacaaatagcttctgttatcttatccgttttcataaactctctgcttataaccctcataattacaaaatctgcaaagaaaatgggaaactacaggcacctaatgatatatttttgctgttgttccataatgttttcattaatggatattttcattcgaccggttattcatacttatgaaagtgcattctttatggtaatggatcttagaggtcgagatatgtctcttgatctggctggtggaatgatatgcgcaatggctggttgttttggagtgattatctatggaatagccattcatttcatctatcgatattttgcactggaaagaaacggaagagtcaaatattttgacacaaaatttctaccactctggttcatgattccgatacttggcggtgtcagttggacacttgtctcgtggttttgctttccaatgaacccggtcacatccggttatatcggacccgatctctacgaaagtttcaagttggacatcaaccaatccgcctacgcagctgctttattctatcctccagatgtaaatggaaaaaagttgttcaacttgaaagctggacttggattaattctctacttgctgataatggcaatcccattttttgtggtgatttacgttgggattaaaagtgtatcaaaaatcaagcaactgccgtcgtcaaattatggaaaagggttacaaatgcaattgcataatgcacttgttgcgcagacaattatcccggttgtcttcttatttgttccatttggagtccttttcatctgcccgatttttgagattaactgccagtttcttgcgacaattctcacatttgtttatgcaatctacccggttcttgatcctctgccaatatttttctttgttcaaaactaccgtaatgcgttgtccgagtggttctcgtgtttccgatgtagaaagaagtcaagagttcatattgcaccggaagaagtctccagagatgctgattcatgttaa

SEQ ID NO: 351 - DNA, 1038 bp, Caenorhabditis elegans
atgcacgcaacaacatttgaatcaataaagtttgtgtttcaagtaacatcagtcatattttcatggctaataaactcatttttgatctacctaattctcacgaaatcgacgtcaaaaatgggaaattatcgacatttgatgatttatttctgctgtttctctattttattttcaacactggatatcattgttcaaccgaatattcatacctacaaaagtgcattcttcatgatcatggactacaagaaccgtggaattcctctgtggatggctgaagttctgatttgcttaatgtgtggatgttttggaatgacaatatacggaatcgcagtacatttcatctatcgactatttgcattggaaagaaaaggacgtcttcaattcttccaggaaaaatatttatttttttggcttctgattccattcattggcggagccgcatggttttccgcttgcttcacagttttctcgatggatccgatgaaaactgattatgttagacaaaccacaaaagaattcttcgacctgaatattgacaattgtgtctacgcaggagctgccttttatcctctcgacaaaaatggaactaccgtaatttcaacaagaagctttattggattttcgctgtttctggttgttatgttaattccatttgccatcgtgatctacgctgggatcaaaagttattttataattcgagcattgttgaaacaaggagaaacacgatatgcaaaaaacttacagatgcagttgtacaaagctcttgttgcacagacacttatctcaatattcttccttttcatcccattcggaacaatatttgtacttcctatttttgaaatcaattgtcaatttttgacggcaccaatcacttttatttacgctctgtacccggcaatcgatccattaccaattctgtttttcgtcgactactatagaattgttgtttcaaatttgttcaacagaattcgttgtaaaaattcaagagttggtatctatgaagaggaaccggcgagcagcaataatggtagaacttga

SEQ ID NO: 352 - DNA, 1020 bp, Caenorhabditis elegans
atgacgcctgtaacttttgcaaatatcaaaactgtgattcaatttatttccgtttttatttcaatattcatcaatgctctctccatctaccttatcgtcacaaaatctccaaaaatcatgggaacatatcggcacttgatgatttatttctgcggttgctccatggtcttttctgtactggatgtgattgttcaaccgagcattgaaacctacaaaagtgcgttcctaatggttgttgatgtcaaaaaccgatctttaaattcctggtcagcagtattatttatgaatcttctttgcggttgtatcggagtcactgtatatggaattgctattcattttatttatcggttattagcgctagaaagaaaaggccgactccggtatttcaattgccaatacctacccatttggtttagcattccgattctcgctggaacaatatggtacattgtgactgaaaatatttttggaatgaacccagtaaatacggagtatatcagaaaccccgttaaagactctttcaacatgaaaatggaggattgcgtgtacggtgcagctgtattctatccaattgataaaaatggtatcaaaactatcagttggatctcattttttggattagggtgttacttaacacttctaacaattccatttatttcaatcttggttgctggagcaaaaagttggaatcatgttcaaaaactgctcgaacatggagaatccgagtttgccaggaatttgcagatgcaattgtacaaggccttaatagctcagactcttatcccagtggtattcttcttcacaccatttggttgtgtatttgtacttcctgcatttgaaattgaatgtcaatttatgtcagctcccatcacattggtttttgcaatttatcccgcaatcgatcctttacccaatttgttttttgtggactactacaggaatcctatatcaaattttctccgcaaagtttggtgcagaaagcctaaagtcgaagccgcgacaattaattctacattgtga

SEQ ID NO: 353 - DNA, 1026 bp, Caenorhabditis elegans
atgaaagcaaaagttgattttgaaatgctaaaacttgtaattcaagtagtatcagtatttctttctattacaatcaattccattctgatatgccttattattacaaaatccccaaaaataatgggaacctatcggcatttgatgatttatttctgctgttgttctatattttttagtattgtcgatgttattgtgcaaccgaatattcaaacttatcaaagttcattctttatggtaattgatgcgaaaagtcggagtatggagcattgggtagttggagttttgatgcacttgttgtgtgcgtgtttcggtgtagcaatatatggaattgcaatacattttgtatatcggtattttgcattggaaagacagggacgagtgaagtatttcaataaaaaatatctcgtgttctggttcacaattccattgcttggcggagcagcttggtacgccgttacagaatgttgtctcacaccggatcaattgggaattgaatacattagagcaactgtgaaagaatcgttcagcattgaaatggaaaatgccgagtacacaggatgtgtattctatccactagacactgatggaaaacagtttataaattggcgtagtttcatgggatatactggatacttgagcattatggcagttgcatttttaattatttcatttgctggatgtaaaagttgttatctggtcagtaacttgttggatcaaggagaatccgaattctccaagaatctacaaatgcaattgtacaaggcattagtagctcagacagtcatccctgttgtattgctctttattccatttggactcctattcactcttccaattttcgagattaactgtcagtttcttgcaactattataactttgatatttgcaatttacccagctgtcgatccattgccaattctttattttgtggaatactatcgaattccaattttggaagtgttcaagaaaccacattgcagtggcagtcaagtatatccagccagcaataattcagtggaaaattag

SEQ ID NO: 354 - DNA, 1038 bp, Caenorhabditis elegans
atgaaagcaaaggttgattttgaaatgctaaaacttgtaattcaagtagtatcagtatttctttctattacaatcaattccattctgatatgccttattattacaaaatccccaaaaataatgggaacctatcggcatttgatgatttatttctgctgttgttctatattttttagtattgtcgatgttattgtgcaaccgaatattcaaacttatcaaagttcattctttatggtaattgatgcgaaaagtcggagtatggagcattgggtagttggagttttgatgcacttgttgtgtgcgtgtttcggtgtagcaatatatggaattgcaatacattttgtatatcggtattttgcattggaaagacagggacgagtgaagtatttcaataaaaaatatctcgtgttctggttcacaattccattgcttggcggagcagcttggtacgccgttacagaatgttgtctcacaccggatcaattgggaattgaatacattagagcaactgtgaaagaatcgttcagcattgaaatggaaaatgccgagtacacaggatgtgtattctatccactagacactgatggaaaacagtttataaattggcgtagtttcatgggatatactggatacttgagcattatggcagttgcatttttaattatttcatttgctggatgtaaaagttgttatctggtcagtaacttgttggatcaaggagaatccgaattctccaagaatctacaaatgcaattgtacaaggcattagtagctcagttatatttccagacagtcatccctgttgtattgctctttattccatttggactcctattcactcttccaattttcgagattaactgtcagtttcttgcaactattataactttgatatttgcaatttacccagctgtcgatccattgccaattctttattttgtggaatactatcgaattccaattttggaagtgttcaagaaaccacattgcagtggcagtcaagtatatccagccagcaataattcagtggaaaattag

SEQ ID NO: 355 - DNA, 1044 bp, Caenorhabditis elegans
atggatcttactgtattcaactcgttccttaaaactgcccagtttgtgggaacgtgcattgcaaaccctttgaatatatttttgatatatctcatcttaacaaagtcctcgaaaaagatagggaactacaaatatcttatgatctatgtttccatctacgagatacttttctcatgcagtgctattgtaactgaaccgctgcttcactcatttaccactagagttattgtaattgttgacgttcacaattcgatattcagtcgagaaatttgctccattctggattgtctcatgtgcgcaatgtacggtgtctcgatgaatgtttttgctttacattttttataccgttatgctaccttgtttccaaaatcgaaaaagttattcgatggtgctaggatcattttttggttgacggtaccacaaatctacggagttgtttggcttgtaacgtattatgcagtattccgcgaatcgcccgaatatacagaatttattcgaaaaacattaatggaaaatttggatatcaacgtggacgatgttgtttacgtgggaccatattactatatggaagacaaaaatggcattcacgacatggattggacagccttctgggcgatggcgattgtctggcttttaattatgtcatctgccgtcacagtattcatctgtggttatgggtgctataagaaaataacaaaaggactagaggtttcctcaaattcgaaacaaaccaagtcgattcaaaaacaactgttctatgcattagtagttcaatcagcaattccatttcttctcatgtacattccaagtacagtagttcttttctgtactttaattcaacttgacgtcggaagtgcaagcctattcataagttattccattgcaatatacccagtggtggatcctctacccacacttttcattgttcaaaattacagaaacgctgtcaaaaaaatgatcacacggacttggaatattgtgacaagaaagaaagacatgaattcatcagcacagataccatcttccaacaaaaccacggcatga

SEQ ID NO: 356 - DNA, 1056 bp, Caenorhabditis elegans
atgttaaagagcccgttctcattattttgcaaaagtttacaagaaacctgtacatttatctctcttattttgaatgcttatcttatactactaatcatctacaaatcaccgaaaaagataggaaactataaatatttgatgatctacatttgtgtttttgaaattctttacaccattcttggtcttataacaaaaccttatgtacattcatacacgtcacgtgtcatcgtcattgtcgatgtcaaaaactcagtgttcagcagatctgtaaacaagtttcttaacagcctgatttgtgggttttacgggtgttctgtgtcaattttcgcaattcatttcatgtatcgatatggagctctcgacagaaattacgaaaagcatttcaagggatggaaaatggtacttctgtgtttgataccaatattttacggtatcatttgggggctcacaatgcattttatttttgaggaggataaagcattcacagagtttatgagaaaagatatatgggatctttttgaacttcctgttgaggatattgtatatactggatcatattattatccagaagataaatttggagtcagagaaatgaattggagagccgttggaggaatggctgtgctctggtttgttattggatcttcaactattactgtaatatactttggtctcaattgctactttaaaatacgggaaataatgaactcaacggcaggaaacttttcaaaaagcattcagcgtcagttgttccgagctttagtaatacaggcggcaattcctctactcctactctatataccatgctcaattgtgttcatctgtcctttaattcaagttgatcttggaaatatgagtgcatttattagtgtatcggttgccgtttatccagcaattgacccactacctactttgttgattatcaaaaattataggagagctaccattgaaattttcacaaaaactgtgagacttcttcgtgaagcaccatcttccacaattgctttggttcatcgatcatctaatggaactggagagcatcggattggaacttag

SEQ ID NO: 357 - DNA, 915 bp, Caenorhabditis elegans
atgactatcataatgaattgttttatgatttatttaatcattaaaaaatctccaaaggaaattggacgatatcggtatttaatgttgtacatttcgtttttcgagattatttattgcattgcgggaaaagttgtgagaccttttgtccattcttatggatcacgagctataataattgtggaagcaaaggatgcatgggtaaaccgtactatcatgaaagtgataaatagtgttgtcagcggttgttatggatgttcttcatctatcctcgctattcattttatgtaccgatatggatccttgcatgttaatcatcgaaatatgttcgaaggttggaagttcgttgcctggtgctttattcccgccagctacggagcaatttggagtctcacaatatttttcatttttcccgatgatgatggatttactgaactgataaggtcggatattttggagacatttgactggaaaatggaggatattgtttatactggattttattattttcgagaggacaaaaacggccttcacggttttgaaccacttcctatcgttggaatgtgtattctctggagcatgatgacttcctcttcatttgttgtatacttttttggttatcgatgctacaaacttgtgtctacaatgacgaaaaattcgttttcaagccttgcacaaggactacagcatcaattattcaaagctttggtgtggcagacagtcattcctattttcatggtgtatattcctagttctctaattctaatttgcccactttttaatataaatcttggccgtatcagcgtcgttatcactgtcactatgtcaatttttactgcactcgatccacttcccaatatatttatcattaagaattacaaaagagcaacataccaattgctttgcagtccggtatga

SEQ ID NO: 358 - DNA, 972 bp, Caenorhabditis elegans
atgtttgacagcggtttaccgatattctggggttggtttcaggatgtgtttgcagttatgactatcataatgaattgttttatgatttatttaatcattaaaaaatctccaaaggaaattggacgatatcggtatttaatgttgtacatttcgtttttcgagattatttattgcattgcgggaaaagttgtgagaccttttgtccattcttatggatcacgagctataataattgtggaagcaaaggatgcatgggtaaaccgtactatcatgaaagtgataaatagtgttgtcagcggttgttatggatgttcttcatctatcctcgctattcattttatgtaccgatatggatccttgcatgttaatcatcgaaatatgttcgaaggttggaagttcgttgcctggtgctttattcccgccagctacggagcaatttggagtctcacaatatttttcatttttcccgatgatgatggatttactgaactgataaggtcggatattttggagacatttgactggaaaatggaggatattgtttatactggattttattattttcgagaggacaaaaacggccttcacggttttgaaccacttcctatcgttggaatgtgtattctctggagcatgatgacttcctcttcatttgttgtatacttttttggttatcgatgctacaaacttgtgtctacaatgacgaaaaattcgttttcaagccttgcacaaggactacagcatcaattattcaaagctttggtgtggcagacagtcattcctattttcatggtgtatattcctagttctctaattctaatttgcccactttttaatataaatcttggccgtatcagcgtcgttatcactgtcactatgtcaatttttactgcactcgatccacttcccaatatatttatcattaagaattacaaaagagcaacataccaattgctttgcagtccggtatga

SEQ ID NO: 359 - DNA, 1041 bp, Caenorhabditis elegans
atgcttcaaagtggttggtctcttttttgtgggcaccttcagaacgtttgtgtctgtttaacaattattttgaactgttatatgatttacttgataatcaacaaatctcctaaaaagattggtaattacaaatacttgatgttgtacatttcgttctttgagatcacttacgccattttggcaacagttacaaaaccgtttgtgcactcttacacctcgcgagttattgtcattgtcgacgcgaaaagctcatggttcaatcgtgacgtcactaaaatcctgaatagttgtatctgtggattctatggatgctctgtcacgattctcgcaattcatttcatttacagatatggttctttgcataaaactcgtcgaactctttttgaaggatggaagtttatagcgtggtgtcttgttccaatattctatggaattgtgtggggtctaacgatattttttattttcccagaagataaaggatttacggaattgataagaaaagacatttgggattattttgaattgagcattgaagatattgtctacactggaccttattattacccagaggacaaaaatggaatacatggaattgagccacttgcagtttttggaatgctggttttatggtttgttattgtctcttcatcgcttgccgtaatgttttatggttttcgatgttaccgaacgatgagtgaattactgagccgatctacatctacttttgcacaaggactacaacagcaattatttaaggctttggtttggcagacaataattcccttgataatgctgtacgttccatgttctattgttttcatgtgtccacttcttcaaatcaacattggaaattgcagtgcatttattacagtatctgtggcagtctacccagctgttgacactctcccaaatatattcattatcaaaaacttcaaggaaaccactttagacttgttgtgttgtggccaccaaaaaagcaaaagctcaagctcttcgaaaacttattcttcaaaagggggaattaatattacaactacataa

SEQ ID NO: 360 - DNA, 1065 bp, Caenorhabditis elegans
atgctcgagttgctgaaagatattgttcaatgttttgctctccttatttctatttttctaaacacaattttaacttatttaattcttacaaaatcaaacagtaaaatgggttcctacaaatatattatgatgtatctatcattatcagcactttgttattctgtactgggaatgattgtcagacctgatcttctatcgtacagctcatgttttgttgtatatattaaaaattctacttcattttttagtccaacagtaatgatttatttaatgtcgctcatttgcggtttttatttcttttttgcatctttgatttctgtccactttgtctatagatacaaagctctgaaatatggctcgaaatggatatattttcatggaaagtatacatttgcctggtttcttatttctccaatactctatatcaattggacattaaattgtatatttgcgtttcagccaaatcaaagaagtacggaatttctaaggcctagaatggaaagagattttggaataaatgtggatgatgtgacttatattattgcggatttctatccaatgcatgaaaatggccagaaatttccatcaattggagcatttatatcaggatttaattttcttttaatgactacggtttcattatttgtaatcttcatattcggcttcaaatgctactacgaaatgacacgggttgttgttcccggacgaaactattcaataactcaaaaattacttcaaactcaattatttcgagctctcgtattccaaactcttattccactcatcattatgtatattcccttatttattttatttctattcccaatgctcaatattgacttgggatttgcccattacgtatctatttcgatatctttatatcctgcactggatgctcttccaagtattctactaatcagagattatcgagattctttgattaaaatgtttaaaaagcaagagaatgtaccaatgtttgcaccgtactatgtacgaagaggaagtacaacaatttcaagtgccagaaaaagccatgttcaattgaaccgtgtcgagttgagctaa

SEQ ID NO: 361 - DNA, 1041 bp, Caenorhabditis elegans
atgtcgattgcatggctttcagtccaaactcgaatccaacaattttcactttttatatctgtgatcttaaattcaattttggtatatttaatcctaaaattctctccaaaaaaaattggatcttacaaatatctgatgatttatatttccttatttcaaattttttactcaattatggatagtatatccttaccgacctatcacgcttattcgtcagttttactagtttttaaaaacattcgggaccaaccctacattcccatttccgttcactattggcttttggtagtgtattcaggatgctatggattttgtatgggaatatttggaattcacttcttctataggtatttggcgatttatggacatactgaaatgattagaaagttagtttgcatattgttcttagttcctccactattcggaattatctggagctttattgtagcaatatgttttgggcccacttcagaagttagtgcagaagttgagaatagtattctggaatcttatgacttgaaaattgacgatatagtttatatcgctgcatttgtttggccgagaaatgagactactggagtgaaatatctcaataaaagatccgcaattggaattggttttgatcagttagttgtgattatctcacttactgttattgcatattgtgggacatgttgctactataaaatacaacagcaaatgagggttgcaatttctttgagcaaaattacgaaaaacctacatcgtcaactgttctacgctttggcaatccagaccgcaataccaatgcttctcctccatcttcccgtttctatactcttcatgtttccaattatggattcaaacttggggatttttaccggcttcgtcacaatcacgattgccgcctacccggcaattgaccctctaccaactatgcttgtcattgagagctatcgaagtgcagtttacaatttcattaacaaaatattctgcagaaagaagaacgatgtgagatcagagaatgaaatatccatgacaactattcacgtgacagtataa

SEQ ID NO: 362 - DNA, 1071 bp, Caenorhabditis elegans
atgcatctcagtgaattttggaatatttttctgaaaatcgtacagtacacctccgcgtttatgtcggtttcgttgaactgtattctcatatttttgattttggcgcattcgccgaagaagctcgggatgtacaagtacttgatgatctacatatccagctttgaggctctctactcattatgggatgttaccactgaaccgatggttcactcgtacaaagcggcgttcgttgtgttccgaaactttaaaaattcggattttgaccgtgagcatagcttcatcctcatcgtgatctactgtggctgcttcggcttctcgttggcaatcttcggtgttcactttgtctatcgttatggtgcagtggtgaaagagttccgtgacaagtggctcggcgggaaaaagatctacattctgttcttcatgccgattttctacggaacatggtggtctgtcctttgttatttgtactttcatttcgatgattcgacggatgattatatgagaaaaacgatatttgacgggtatgacactaagattgaggacacctcctacatcattgtcctcttccaccctgttgataaaaatggaacttctcatccggatccggcggtttttgcctcgatcgcttgtatgtggttcatgattctaagctcagtgttctcggtattcttcttcggaatcaaatgctattttcgtataactgaagcgctttcaagaacatgcaacgtgtcgagtgtcactaagggattacagcaacagctttttcaggcacttgttgttcagactttcatccccctgatcctcatgtacatccccatcgcaatcctcttcacatttccgatgattgctgtggatattggatttgcgagcagcttcgttgcgatgacaattgcagtttatccagccattgatcccctgccaaacatgtttattataaaaaattatcgaaaagcagtttttgcctttttctctgccatttttcgcaatccgtgtgggtcaatccgccgtgctcagtgtacacaaatcgaattggtatcaaaaagtgaaactccgaagaatattggcttgtaa

SEQ ID NO: 363 - DNA, 1020 bp, Caenorhabditis elegans
atggtcgactggtttcttgtggatcaaacgattgctcaacttggattctatcttacaacaacttcacagttggtattgatttttcttacaatcttctatgtaagaaaagatttgggcgcctacaagcgcttgatcgtgttgtttgcagcaatgggaattgcgtttgcgagtattgagtttgtgatgtatccggtccttcattcttttaatgctggttatgtattctacacaaccaatcgtcctctgaatgtttcaaatgaaactctgactgttctgctagcagtctacactgccctatactctatcacaatttctcttcttgccgtgcaatttgtctatcgatacattgcagtgtttcattcagaaggtctcagattcttcaaaggttggtattttctacttacgattgtgtactcgtattggttcggatttgaatgggcactcggattgtataaactggacgaagcagatgaatacgcaatagagtatatgcgacaagaactgatggatgtctatcaggtgaatatttctcaagtcccgtgtgtgataaatttgatatatcaaaaccttcccaactccaccgatacattcatccgatggcggtgtgtcatgtgtacacttaatatgacattcatcatgattgtccaatatggggtgatgatattctgtggatcacacttgtattttgaaatggaggagaaactaaaaatggtgtcggatcaggaaagaaagcttcacaagcaaatattcaagacattgatgcttcaaatcactacaccaacaattgtcttgttctctccgatcatctacatcatctccgtaccatttttcaacattgaagttagtgtccctacaggagtatttctatctgtttttactctataccctgctctcgacgcgttcatcattatgtatgtaatcactgattacagaaaagcaattctaaagattcttagaagatcaggttcgggcagtgttacacatccaacacgttacaccacatcgcgtacagacacttaa

SEQ ID NO: 364 - DNA, 1029 bp, Caenorhabditis elegans
atgtcgcttcaactgatatgtacaattattgcttgttttcttaattccatactacttgtattaatttggacaaagtctccagttcaaacagggaaatatcgatggctaatgacgtttaccgcatgctttgaaatattctgggggctttttgatttgccagcggaaattattgctcattccgctggatgttcgttcattgtttttcgtattaactatgaagattcagtgatcggctctcaatattcaatcattttattaatgatttatgctgggatttttggggcatcgatggcggttttcgcatcccattttatttatagatatgggtgcattgaaaaaacattcggtacaaaatgcacatctaattggagatttggttttctttttattgttccactactttatggcgtttggtggggaactcttgtgaacatatggtggagggccaatccagatatggacgaatatgcaagtatcattgtcgattgtacagtaggtttacctattgaaaatgtaacatactttggtgcaaagttttacaattttgataaaaatgaaacaatgtccatcaacctacctgcatggatcggagtatgtcagacatcgttcatggtgagctcttcactgatgtgcgtatttatattcggtgttttatgttataaacgtctgtctaacaccctatctatagtatcggacgctgccaacaatttacaaaaacaattattttattcattagtactacagactctaattccacttgttctaatgcactttccaatcacgatattttttattggacctatgcttaccctggatactgatttcacaacatatgttgtactgaacacaattataatgtatccagcaattgatccacttccaaactttatcataattaaaagctatcgagaatcagtgaaagcttgtgttcgaactgtgttatttctgggtccaagcaattctcaagttgtgcacaatgcatatagtatgccttctgtaaatagtattgtcaatcgtgtagttacttaa

SEQ ID NO: 365 - DNA, 1044 bp, Caenorhabditis elegans
atgctcactgaagagtggctccagtttgaaggcgaaactcaagatgtttgtggatttatttccattttcacaaatttgttcctaatatatttgattttgaaaagatctcctgatgctcttggattatataaatggctcatgatgtacacaagcatttttgaactgacctactcttttgtgaacctattcgctggctgttcagttcgaacatttggttcagcatttattgtgttccgaaaagatcaacatttccatttgatttctcaatttatggctgtcaattactgttcattctttggattttctttggcaattattgcctgccatttcatctatcgttatggtacagttgaactagaattccacaaaaaatatatttctgggtccaagcatttactgttgtacattggaccaatatcaatcggaatcatttgggggattgtttgttcggtttattgtggggaaacacctgaaagatctgactacttgaggaaaaatatgatggataattaccgcttaagaattgaagacgttgggtacatcagtgctaattattggccaatggggaaaaatggaacagtgagaccagatttcgactcatttttcggaacttttttgatgtggattattgtgggagcatctattggcagcgtcctctacttcggaattggatgttatcgttggatatcacaccaattgaaaattgtcgaaacccaatcgaacactgtgaaatcccttcaaaaacaattattttatgcacttgtagtacaatcagcaattccaagtgttctcatgtacttccctatcagcatggcattcatttttccaatgctaaacattgaattaaacctcaaatatccatttattggactaacaatcgctgtttatccagctattgatccacttccttctctcttgatcattagaagttatcgggaaggatgcaatgatattttccgaaaattgatgttttggaaaaataattatcaagttgcagttgtcagatgccaaacacttttgaatagttttgcaattactgtgtag

SEQ ID NO: 366 - DNA, 987 bp, Caenorhabditis elegans
atgcagtttgaactcacatttcaacggatttgcgcatttgtttccgttatcactaattctctattgatgttcctcattctcggaaagtcaccacctcagttagggacctataagtggctcatgttgtatacatccttatatgagttagtttatacatcaatgaatatatttgtagaaccatccactggtacatttcaatcgtcttgctacatgtttcaagatatgaaaaagagcatgtttggtgccgacgggacattgtttttcatattgatttactgctcatgctatggattttcaatgtcaatttttgcttgccactttatttatcgttatggtaacgttaacacaatcttcaagcaaaagtacatatctggtaaaaaacatttattcctatacattgctccattgttgagtggatttgtttggggactggtgacttggctaacaatgcacgagtcttcatcgaaaactagttttttgaaaattcatttcgaacaagttttaaaattgaacattgaagagtgtgcatacgtcgctttttggttttggcccgttgatgaacacggagaatttcagcctgatttaatatcctttctaggttttggaattatgattctgattctgagttggtcgtttatcagtgtcgtttatttcggtttcaattgttataaatacatctcaaaacaaatgggaagtttatcatcgcaatcgcaggctctgaaatctcttcaagctcaactgttctactctttaattttccaaaccgcaattccctgtgttttgatgtatctgcctgctgggattattttaagtgttcctatgtttaatgttggtttcaacttggaagttccacttctttccatcactatagcaatctacccggcaatcgatccacttccaacaattttcataatcaaaagctacagaagagggttgattgatatgtttcggtgtcacaagaaaaccctgattgtagctagttcgtaa

SEQ ID NO: 367 - DNA, 1077 bp, Caenorhabditis elegans
atgccgactgtgcaatggattcagctggaagagacttccaaaataactggcggttcgatatctgtgattacaaatgggctcttgatgtatttgatattgacaaagtctccatctaaacttggatcatacaaatggcttatgctttacacgtctttttttgaatttttctacgcatttgtgaacctgtttgcaggaccgtttgtgcacacatatgggtctgcttttattgtatttcaagacatgaacacattttacttcagtcatcatgttgcacaatttctagtttgtctttactgttcctgctttggtttctcaatggcaatttttggaggtcatttcatttaccgttacggagctattgatagtcagttttatcaaaaatacttgtctggtttcaaacaatcacttttgtatattcttccattttgctatgggattctatggggtgtcatttgctggatttattatggagaaacgccggatagaaccaactatttgagggaaaccttgctcagcaactaccgattgaaaattgaagaatgtgcatacattagtgctcgtttctgggtctcagataagaataactacttgtttccggacttcgattcattttttggcatcggtgtaatgtggattatacttggatcatccatgatcagcgtaatttactttggaacacgatgctaccgttggctgaccaaaaagcttgagatgatagagaatatatctgattccattaaatctttgcaacgtcaattattcaatgctctactgatccagtcagcaattccacttttcttgatgtacatgcctgctgctatggtttttgttttcccgatgcttaacacagaacttaatttgaaatatcctttcattggaattacaattgcaatttatcccgcaattgatccatttcccactattattattatcaaaagttatcgacgaggattttatgaacttcttcgatgtttgacaggtcgacaaaaaaacaaagttgcagttaatcctaatgttccttcacacgcttatactcttcctatgagcgcaagcaatagtatttacgtgacaaattaa

SEQ ID NO: 368 - DNA, 1056 bp, Caenorhabditis elegans
atgaatatttccaaccaaacttttccttacgaaaattacatagttgtctctaaacgtatttctcatctcggcttctgctccacttcatttttctgcactattcttattataataattgtgaaatttagtaataaaaatgttggaagttacaaatatctaatgattattttttctgttctgggaacattgttttcaatagttgaagggatactttgtccgaatgagcattcgtacactgcgagttggctattgttcattacagaacgaccgtttgggctcagcccagactcactaacactattcctcgtactttacgcagtattatacgcagcaacaatttgcatgctatcagtacagtttgtgtatagatactgtgcaatattccatcaatttgggttaaagtatttcgaaggatggagaatgttgtcaatagctgtatattgttccggttgtgggatattatggggaggatcgatgtaccttttttctcaagttgatgattacgctaaggcttatctcagaggcgaaatgagtataaaatatggaatcaacattgacaatctggttgcattcacattagttgcctacgacaaggatggtcattttagatggtggaattctattgcaaatttcatcttatgcattatcatgtttgctcagtatgcaattatgatgttttgtgcagtagttatgtatcggaaaatggaggagaacatgaaaatgatgtctgaatcactacgcagagtccaccggcagttcttccggacgcttgtcattcaaatcatcgctccatccatattcctattttccccgctaacttttatactataccatccgtttttgaattatgcaatcagttttccatccggcatgtttttgtgtgcaatttctttatttccagccatagatgcaattgttatcttgactattgtgagagaatatcgaaatgccgtgaaaaaaatcttccggtatgcgtgttgtcgaaggaagcaaaatgaagtaaaaacatcaatcacatatgcttctacaactctaacaacttctactgctcaataa

SEQ ID NO: 369 - DNA, 1062 bp, Caenorhabditis elegans
atgaatatttccaaccaaacttttccttacgaaaattacatagttgtctctaaacgtatttctcatctcggcttctgctccacttcatttttctgcactattcttattataataattgtgaaatttagtaataaaaatgttggaagttacaaatatctaatgattattttttctgttctgggaacattgttttcaatagttgaagggatactttgtccgaatgagcattcgtacactgcgagttggctattgttcattacagaacgaccgtttgggctcagcccagactcactaacactattcctcgtactttacgcagtattatacgcagcaacaatttgcatgctatcagtacagtttgtgtatagatactgtgcaatattccatcaatttgggttaaagtatttcgaaggatggagaatgttgtcaatagctgtatattgttccggttgtgggatattatggggaggatcgatgtaccttttttctcaagttgatgattacgctaaggcttatctcagaggcgaaatgagtataaaatatggaatcaacattgacaatctggttgcattcacattagttgcctacgacaaggatggtcattttagtttcagatggtggaattctattgcaaatttcatcttatgcattatcatgtttgctcagtatgcaattatgatgttttgtgcagtagttatgtatcggaaaatggaggagaacatgaaaatgatgtctgaatcactacgcagagtccaccggcagttcttccggacgcttgtcattcaaatcatcgctccatccatattcctattttccccgctaacttttatactataccatccgtttttgaattatgcaatcagttttccatccggcatgtttttgtgtgcaatttctttatttccagccatagatgcaattgttatcttgactattgtgagagaatatcgaaatgccgtgaaaaaaatcttccggtatgcgtgttgtcgaaggaagcaaaatgaagtaaaaacatcaatcacatatgcttctacaactctaacaacttctactgctcaataa

SEQ ID NO: 370 - DNA, 1092 bp, Caenorhabditis elegans
atgcccgtttcgtgggatgaaattcaaaattccgtgcaattctatgcagccatcactgcggtcccactcaatgtcctactgatctacttgatcatcaagtactcctccagtgaaattggagcttacaagtacttgatgatctacatttcggtttttgaactcatctatgccatcattgatgtaatcgtatccccattcgcacatgcctacggatccacgttcttagttatagttaacctgaagaagacatcaattccaagatgggttcacagaattttactttctgcttactgtggattttatggatgctcaatggcaatttttggtattcactttgtttatcgttacctggtcgccaaaggttctgacttgctgaagacgttccagtcaaagaagattattggttggcttttgatacccgcaattttcggactcatttggagctgtctcacatactggccatgtgcaaaacgagagtctaccgatatctatgtgaaagataatttgtacgaaaaattcaatttaagcattgatgatgtggaatacattgcaccctacttttatgagttggacaaaaatggaaatctggaaatctactggcccagttttgttggcattggtgtgaactctgttatcatcaatgtttctattgcaaccattatctattttgggaaaaaatgctacacaatcctcaactctcttgtaccacacactagcaagtctgaaaagaatcgacgtcttcaaaagcagttgtactttgctcttgtcactcaaaccctcatcccaattgttttaatgcatattccagtctctacgctttacttttccgcgttcttttgcattgatcttggatccatcagcggaatcgctccattggcaattgctctctacccaacgcttgatccacttcccactatgttcattattggacattacagaactgtcgtgttcaattggattttatggttgccacgaaaatttggaatctgttccaaaaattcggtaaatcctgaaattgatgaaacaactgttcaagatggacctgatgcagttacccaaagtaatgcaataattcaagaatcacaagtttaa

SEQ ID NO: 371 - DNA, 1038 bp, Caenorhabditis elegans
atgccacttatttcggataaaatccaaattcctgttcaaaagggatctgcaataattgctctaattttgaatacatgcctggtattacttatcattagaaaatctccaaaggagcttggtgcttacaagtttttaatgatttacatttctattctcgaagtcctgtacgcaattgtggatattctagtgttaccgatttttcataacactggcttcacatttatcatcctgacgcgtctagaaactgcgtttttcggaccccaagtccaacttatcttgtctggaatttattgtgggttgtatggatcgtgcatggcaatgtttggtatacactttatataccgatgtttcgtgatgaaaggcaacgcaaaactcaaaagttttcactcctggcgaatattattctggtttgctattcctataatttatggattagtttggggttcgattgctgtggttttttgtggtccaagagatataactgacaaagtgattgaattcgatcttttagacagtttggatatcaactttaagaatactgtgtacgtagctccatacttgtttgatgagcatcacgaaatatactggccagttgtaatttcccttcttgtggattgcatcattattaattcttcatttttcactgtttgctattttggctatcagactttcagggaattgagaaaactaaaatatagcaatgtttctcttaagaataaaaccctccaagttcaactttactatgcgctggttacacagacccttattccagtcattctcttacaacttcctgctacgattttatttctctctgtgtttgtctcttttgacgttggtgaattcagtggtcttgttgcgatgacaatcgctgtctatcccgcaattgatccgctgccaacaatgtttattgtgacaagttatcgtcatggaattttggaaatattcaataaaataacgaggattattatgtgtcgatggaatcgcccaactcgacaaggaacctctaatacccaaagtattgaaaccacgcgtctataa

SEQ ID NO: 372 - DNA, 1041 bp, Caenorhabditis elegans
atgctcgactggaagttatttcaaaattaccagctgattggatctgtaattggattgttgctcaattcgctaacaatttctctggtggtgaataagtcacctcaacaaatgcgcgcatacaaaaatttgataattctcacttctctttttgagattaattattctgttctggagttactagtgcaaccaatgtttcattcttttggatcagcatttgcaatggttataaatgtagaaaaatgctatctagatcggaatgtgcttatggtgcttgtttcattttacaatgcatttgtcggttcgctattggcaatgttttgtatccagttcacttataggtactgggcaattagcggtaacatatggctcgagaagttcaatggatttagaattttgtggtgggcattagttccagtgttgtgtggagctatttggtggtttgtaacatactttccgtgttccccaaggccgagtgccgatgaatatttgagaaacgaaataatgaatgtcttcaatctagatattgacaaaaacctatatattgcaccgtacttctacgaaaccaattccgatggaatcacagatatctactatccatcattcattgcaattattgtgaatattcttataacaatagtttcattaataactgtattttactttggcttcagatgctatatatcacttcaaaagatctgcaaacaaaatgtttctcaaaacactcgtgggcttcaaaaacaattattctactcattgattgcacaaactttgattccattatttcttatgtacattccaggatgcgcgatgtttttattgtcatttttaacaattgacgtaggctcttttactgggattgtcactgtgacaattgccctgtttcctgcggttgacccacttccaacattgattatggtgaaatgctatagaaattcacttcgatcctatcttcgtgtattcttgagtgcagtttctaaaatgtttcaaactcccgatgtacctgcaaatgtgacagagctttcaaaagttacaagattgtga

SEQ ID NO: 373 - DNA, 1050 bp, Caenorhabditis elegans
atggttaactgggagcaaattctgtattccgcccaggtggctggagctgggattgctttgttcctacattatatacttattaaacttattataaaccattcgccaaaggagattggagactataaaaacttgatgttatttatttcagtttttgaaataatctatgcgattcttgatgttattgttcaaccgatttttcactcatttgaatctactttcatgctcatcgtggacacatcttcatccaaagtgaacaaaaaactttgggaaattcttgcagtcatctactgtggcttctacggatcttccctggcaatcttctccatccattttgcataccgctactgggtagtcagtggaacacatcaaactgtgcttaactcatttcataagacaacagtcttaatttggctaattgccccattttccgttggcctaatttgggctcttgtcggttattttttatgttatccgagagcgagtacaacggaacatttaaacgataatgttcgcgcaaggcttggtttgaatatcagcgatattgtgtattttgcaccttatttttatgagaaaaacgagatgggtcaaaatgtgatatactggccatcgttcattggaattatgctggactcgatgagcattaatatttcattaatgttttcggcgtatttcggaataaaatgctggctaagaatggacgcaattttttcaagctcttctactcattttcaaaatcttcatagccagttgttctatgctttagtggcacaagctatgattcccattttcctaatgcatattcctgctctcacaatgttcattttcacgtttctgaactttgatgccggttttttgagtggaacagtgtcgctgacaatcgcattgttcccaacactagatccacttccaactatgctaattttttgccattatcgaaaagcaattaccaattatattcgaactcgatacaaaaaagtccgaaaaacaaagttttgtagatgcctggtggccaagaagtctagaaaccccaattcatctattacactttga

SEQ ID NO: 374 - DNA, 1059 bp, Caenorhabditis elegans
atggcctcctggaaacagctccaagacaatatccagatcatgggagccggcgttgctttatttttgaattgcatcctgattaacattattactaagcattcaccaaaagaaattggtgattataaatatttgatgttatttatttcatgttttgaaataacatattctctgcttgatgtattagttcagcctatgttccactcattccaagcaacatttgtgttaatcgtagacacatcaatgtctaaaattgataagcttttttggcaaacttttgcatttatctacgctgatttcttcgcatccaccatggcaatattctccattcattttgcatatcggtactgggctatcagcggtgttaacgaaaatatgttgaaatggtttcgaaggcctcgaattttcatttggcttcttgcaccatgtttattctcggcaatttggacaattgatatcactgctggatgccttccacgcaaaagttcaaatgattatttgagagatagtatgtcggaaagacttggcttgaacgtcagtgaaattgtatattttgctccatatttttatgagttcaatgagaatggtgaaaaagaaattttttggccagctctggctgcactctttttgaactcatctactattattatatctcttgtgttttcaatctactatggagtaaaatgttggcgaagaatgcacgcaattttttccagttcctcttcccagtttcaaaatattcatagccagctattctacgctttggttgctcaaacaatgattccagtattcttaatgcacataccagttctcacaatgttcattttttcattaatggagattgatgctggatctttcagcagtatcgtatcaatgacaattgcactatttccaactttagatccactgccaactatgatcattgtgtctcaatatcggaatgtgatcaagaattactttatatctcggttcaaaaaattccgtaattcaaagtgcggaaagtttctaaaaaggaagaaaaaaagagtaaaccgcaatacggctgtcgtactccagagctaa

SEQ ID NO: 375 - DNA, 996 bp, Caenorhabditis elegans
atgataggtgtatacgatcttccacaatatttacacattttcaccaagtgctctctgttctttgctattttgttcaacactttcttggtctacttgattttaacaaaatctccaagacaattgggtgtttataaatatttgatgattcattattcgtatcgttcaagtgtagtggttcttataactacatcagataagctatttagtcgtgacattcttctcactctcaattcattttactggggattttttggatcatccttggcaattttcgcaattcattttgtttatcgatatctggttatcagtggaaatgcattactacaaacttttcagtcatggaaactaattctatggttgatgattccattagtgattggctttatttggtcattaactggcatatttttgtgtggacctacagaggagttcacagagtttatgaggaatgatgtttgggaagtattccatgaaaatattgaagaatttgagtatctaggggcgttaatgtatgaaaaaagttgggcaacgaaaaatatgattatctattggagtccaattgctggaatgacaattatgtcactgactgtgcttgcatcttttttagtaattgtgatatgcggatacaaatgttatcttcgtataaaactccttctaaagaatggtggaacttcatcagcccgttctcaagttctacagacccaacttttcaatgctcttgcaattcaaactttaataccaattttactattacacactcctgttgtactaaaatttagttttgctatttttgatgccggactaggagcgtattgctttgccatgtccataacaatcgcattgtatcctgcaattgatcccctaccgaattttttcataataagcccttatcggaaagctgcactgggatgtttcaaactacggaagcgtcaaatacaaactgtcgatcaaaatcatatgagaagaatgccgattcgtattgtaagaactgtataa

SEQ ID NO: 376 - DNA, 1104 bp, Caenorhabditis elegans
atgttccgtggcctcgagtggggaacactgttgattcaaattcagcaactttctgcagctttttcgatttcattcaacatttttctgattcacctaattgtgaacaagtcaccaaagcaaattggagtctacaagtattttatgttgtatttctcaatctttgaaatattttatggaattgtgacagctctcactagtccatttcaccatacccaatacgcaacatattccacaataattagttccaaagatcgggcattgagccactttgtgctgaacatactaaatgcagtgtactgggcttgttatggaatatcagttgccatgtttgcaattcaattcatctatcgatatttggcaactgtgaaaagtgaccttgctcgctccttccaatcctggaaaatccttctctggttctcacttccacttgtttttggcacagtctgggcagtcgcgggatacgtattctgtgcaccaacacaggaagtcactgattttatcaaaaatagcatccacgttacttttggattggaagaatcagagtttgtgtatttggggccgagaatattcaaagagcacaatggtacgattacattcaatataaagccatcaatcggacttgctctgaacattatgacgatgaacatatcattttttgcaatactctttttcggtctgaaatgttactattacatgagaaaaatgatgagccaaagtggatcgtcaaagtcaataggcctccagcggcagctattttttgcattggtggtgcaaactttgattccagtggttttaatgctttcaccgtttacgtttgctcttattttgtgcattttcgatattaatgatgatgttattggtggaatcgtggtgttgtgtattgctatttaccccgcaattgacccacttccgaatatttttattatcagagattataggagagcactattatattatgtactccgtgtgaaaaataaactgttttgcaaaacaaatgttattagcgcatcgagaaatacgtcttgttatgttgatggacaaatcagtaatgctaccggacaacgtgctttcagcaatgtttcaatgactgcaggaacaatataa

SEQ ID NO: 377 - DNA, 1104 bp, Caenorhabditis elegans
atgttcagcggtcttaaatggggaagacttttgattcatattcaacaggtttctgctgccttttcgattttaacaaatatatttttaatacatcttattttgaacaagtcgccgacgcagattggagcttacaagtttttaatgttatacttctcttttttcgagatattttacggaattgtcgttgcgttaacaagtccgtttcaccatacccaatacgcaacctatttggcaattatcagtgcaaaagatcgtgatttaagccatttcacacttaacatatttaatgcaatgtattggggttgttacggaatgtctctcgctatgtttggtgttcactttatatatcggtacttggcagcctgcggaagtcagttagcaaactcattcaacacctggaaaatcgttatctggttcttgcttcctttaagttttggagcaatttggtcttttgatggttactttttttgccggccaacagaagaagttactaacttcattaaagacagcgtttatgtcacgtttggcttgaaagaatcagagtttgtttatctgggcccgaggatttttcagaaaaacgaaaatggcattatacaattcaatgtaggaccatctgctggtcttggcttaaatgtaatgactgtgaacatatcgtttttagcaattttcttcttcggaattaaatgctacttttgtatacagaacatggtaaagcaaagtgcatcttcgaaaagtaatgctctccaacgccaattgttctacgcactggtgattcaaaccctaataccagtgattttcatgcaacttcccttcacaattgtactaattctgtgtatttttgatataaacgatgatgttatcagtggtttggcggtgatgagtattgcagtgtatccagcgattgatccgcttcccaatattttcattatcaaagactaccggagagcattgctgaattatttacgctggatcaaaaacagattcctatgcaggaagcatgttgtcagtgacgtccgaaacgcttcttactacaccgacggacacactactaaaaatgctccgagtgctcctagtcatgttccgatagttcatatgaatacatga

SEQ ID NO: 378 - DNA, 1068 bp, Caenorhabditis elegans
atgcttggcaaacaatggagtgatcttctgaaactcatacaagatgtgtcagcaggattttctctcatcataaatacattattgattttcgtgattttgacaaaatctccaaaacagttgggagcttacaagtgtctcatgatatacatctcagtttttgaaatcttctattcaattttggatgtggttttggttccgcaacattactcccacggatccacatttttggtgattgtcggaatcaaggataagctcttcagccccgaggttcttcttttcctgagctcttgctactggagatgctttggagcttcgatggccgtatttgcagtccattttgtctatagatggcttgtagtaacagagcacgcgttactcaagaagtttgaaggatggaaaatctggctctggttttccatacctttttggtacgcgctcacctggatttgcactggatatattctatcagcgccaaacggaagaacttccaatttcattagggttgaaaatcaatggaaattcagagaaaatgtcaaagaggtttttgagctggagttcgacgagtacatctatctcggaccatttctttataaaaaaaaagaaaatggaacacttacggtgtatattatgccatttattggattgggcatcatttcgtcaactattatttcctccatcataatcgttttggtaatcggaatcctctgctaccgccgtctcaacagcatcgtggtcactaccatgaattcagttaacctccgaaatctgcaacgtcagctcttctacgtcctggtcatccagaccacagttccatttgtcctaatgcacatcccagcagtcattatgtttgccttcgtatttctggatattgatttaggggtttatagtgcagtggtgtcaatgacaattactatatacccagctgtggatccaattccaacaattgttattgtggaaaactatcggaaaactgtgctaaagttttttggttgctttaaaacaactcatcaaattgggacaatgacgattgcaccaactcaatttgcatccagcactcatgtcaactag

SEQ ID NO: 379 - DNA, 1044 bp, Caenorhabditis elegans
atgcttggcaaggaatggagcgctcttttgcaattggtgcaacattcaactgcagttttttcaattataatcaacacttttttaatttatctgattcttacaaaatccccaaaacaattgggtgcctataaatggcttatggtctacatttcggtttttgaaattttctactcaattttggatgttgtgctagttccgcaacactattcacatggctccacgttcttggtcattgttggcattaaagagaaaatattaggtcccggaggacttttaatattgaacgcatgttattggggatgttatggtgcatcgatggccgtattctctttgcattttatttatcggtggcttgtggtgactgaaaaccctctcctggaaacattcaacggatggaaaatcatcttatggttttcaattcctctttggtacgcactggtctggatttccacgggatacattctctcggctccaaatgagtcaacttcgagatatatcaaagacagtgtaaaggagattttcggtttggaatttgacgaatatgtgtatctggggccgtatctttacgagaaagcggttaacggaaacattcatgttgcgatcaaagctttactgtcattgggaattatttctgtgactattgtgtcttccctcataatcgttctagcattcggcatcctttgctaccagaaaatcaaccaacttgtggcgacaactgcagcttctgtcaaattaataaaactccagcgtcaacttttctacgcactggtagtccaaaccattgtgccatttgttttaatgcacatcccaggagccataatgattgccttcgtgtttctggatatcgacttgggagtctacagcgcagtactatcgatgacaattgcaatttatccggctgtcgatcctataccaacgttgattattgttgagaattacaggaaaactattttggagttctgtggttgcgtgaagaagtcaagaatttcagtgacatctacagttgaaaggccgaaatccgtaatgatatcatcaaatatctga

SEQ ID NO: 380 - DNA, 1056 bp, Caenorhabditis elegans
atgcttggcaaagaatggagtgctctgttgaaactgattcaggatgtttcagcggttttctctattgtgatcaacactttcctgatcgccttaattctgacaaaatccccaaaacagttgggcgcgtataaatggctaatgatctacatttcggtttttgagattttttactcaattctggatgtggtgctagttccgcaacactattcccacggtcccacatttctggtcatcgttggtcttaaggacaaactgttcggccccgcaggcctccttattctgaattcctgctactggggatgcttcggtgcatcgatggcagttttcgctgttcattttgtctaccgatggcttgttgttactgagcacccattgctcgagacatttaacggatggaaaatctggatttggttctcggttcctatgtggtacgggttgacttggatatgcaccggatatattctctcggcaccaaatgagcacacctcgagatttataaaggacaatgtaaaagagatattcgacttggaatttgatgaatatgtctacttggggccatttctctacgagaaaactgataatggaactattgatgtgcacattgtgccatttattgggttgggcataatttctggaactattgtatcatccatcataatcgtcctagtcttcggtattctttgctaccaaaaaatcaataaactagttgccactactgcagcttctgccaaactcatcaagcttcagcgtcaactgttctatgcccttgttatccaaaccctagtccctttcatcttaatgcatatcccagcagcaataatgtttgcgttcgttttcctggacattgatctaggcgtctacagtgctgttgtatcaatgaccattgcaatttatccggcagttgatcctattccgacgttggttattgttgagaattacagaaaaaccattatcaggtacttgaaactagattgtgtcaaaagatcttcagtagctgtagcaacttccacgacagaagcaagatctgcaaaagcttcagatcccgttccatcttaa

SEQ ID NO: 381 - DNA, 1023 bp, Caenorhabditis elegans
atggccacgtggcatacaattctgaaagttgtccaatattgctcatccaccttttccatttttaccaatcttttattgatctatttgattttcaaaaaatccccaaaaacgatgttattttacaaatatttattgattttcacaagtgtatttgagctccattatggcattattgacttgttgataaaaccggaaataatttccgaaaaaacgttctggattgctgaaaccaactcgtccaaatcactggtttctatgacagtaggagaggtgttgttatatgtttgggctgctttttatggcgtcactttgggaaatttcgtgatgcatttttgttttcggtacctaacaataactaaaaacaatagatgggtgtcaggaattccggtactatgcttttggctatgcatcccgccgtttttcggcatatgtttttcatccgtcatttatttttgcctcggctcaactgattcattgaaagctgtggttttaacgaaaattagaaaattcgagaaattcaaaagtgatgatatgagtttttatggtttcactctatacactgcaatagacaactggtcgccagtaaactggagaagtattatcggaaatatattaatagttatgttaatactcatcgcgtttttcataatgatcaaatatggtatgaaaacatactgggaaatcagaaaacttagcgatgtggcagtcaacacatcagaattatcaaaatcacttcaatatcagctgttcatatcactcgttgtgcaagcaatcatcccggttttgctgattttcgttccagcaacatttacagttcttgctctgcttggcaaaggtcgtgaattccatggacatatcatttcagcttcgatagcattgtttcctgctattgatcctctcccagtggtgattattataaaaccatatagaaacgctgtgataggtagcttcaaatcaatattttcaaaacaaaaccagaatattcacccgtcaactctccatgctcaagtgattttgttttga

SEQ ID NO: 382 - DNA, 1086 bp, Caenorhabditis elegans
atggagctaaaatcatcaaactctatgaaaccagcttcctaccaaaattgggtaacaatcgcccaacttgtcgcccaaatcggattttttacaaccacagttttctgtggaattctgatttttctcaccgttttcggtggacagaaaaattttggcagttataaaaacttgctagttttgttttctacagtcggaatatttttctctgtcgtcgaattgacactgtatccgaatgtacattccttctatgccggatacttcttctacagtacccaacgcccatttggtctcaaaattgaaattgtacaagttttaatggcattttatacatctatctatgcatctacaatatgcatgttagctgtccaatttgtatatcgatactgggcgattttcaatgagagcctactccattacttcaaaggatggcgttttctgtttagtattgcctactcgtttattgttggagcacagtggggattatccatatactttttcgatgaaatggacgactatacggataattacatgagaaacgaaatgtgggaacggtacgatatcaatattagccaagtcgcgaaaatggcattggttgcttataatgatgatggctcaattcgatggtggaacgtctgttgcataattgacatgacagttttcatgattgtacaatattcaattgtcatctactgtgcagttgttatgtatcaaaaaatggaagaaaaattgcaacttgtgtctgcgtcgctgcgagaactccatcgtcaatttttcaagaccctaattatgcaaatactgtccccgacaatctgtttatttgctccagtggtttttataatctatctcccaattttcaattttgaagtgagcattccaacggggatgtttttatgtgcattcacactgtatcctgcattggatgcattgattataatgtacattgtcaaagactacagaaaatctgcaaaaagaatattgaaaatcatgatggattcgatatataaaagtttagatctacaaccgacccgagttgaacaaacacggacttcgtccatgcctccaagcaacctgcaaaattatttatag

SEQ ID NO: 383 - DNA, 1050 bp, Caenorhabditis elegans
atgaataattggggatgtattcttagtattattgagcaatcattatctattttatcatttctcactaatagtttattgatttttctcgtattcactagctcaccaaaaactatgggttcttataaatacattatgatattcacttcagtttttgaaatggcttatggtttggttcactttttgataaaacccgaaataatatcaaaagattcgtatgtactagaagaaaccaactcgcaaaagtcgcttatacctctttctgttgccaggatgcttctgttatcttacaatggttcatatgcaattgcactgatcaatttcaatattcattttatttttcgttactttgttatgactgggaacgcaaaacgagtgactggaaaagtgatatggatatggttgagcatcccattcctttactccattttctactcggctcctacccattttttgttgcattctagtgaaagcatggatagagtgataaaatcagaagtggaatatttgaaacatttaccaattgaagatgtagtttattatgcatttaacttctttgaaacaacagaaaactcgacacagaaatctacaaattggaccaatatttatgggatttcatttatgatgcttgttattagcacctccttctctattacgattattttcgcggcaaaggggtattttgaagtgaaaaagttgagctcaatagcaacatctcattcgtctgctagcaaaactctacaagctcaattattttactcattagtcattcagacagttattccagtgattcttattcatttcccaacaactatcattcttattaatgcattttttggtattggacgggaagttcatggtcatatccttacagtatctatttgtctatttccagcaatagattccttgccaagcatgattataattaggccttatcggcttgcaatcaagagagttttgaaatatccattccgacgtagaagctcttcgattgcggcgtcaaataccaaatacctgtcggatgttacaagcagagtagccacaaataattga

SEQ ID NO: 384 - DNA, 1047 bp, Caenorhabditis elegans
atgtctatcgacacgtggctccccaccttaaacaaaactcgaaatgtgctcacctatttcgggatatctgtcaacgcgatccttgttccagtcatctttttgaagtctccaaaagaccttggtctctacaaatatatgatgatctacatttcaacttttgaaatatttttcggttgtgtggagttgttgacaattccggactttttcacaaaggactctgcatttttcgtgatggttgatcccgcaaaaactatccttccgcaatttttgattcaaaccgcggacttactgttctgcggatcttttgcggtctcgcttggaatattcggcttccagtttgcatatcgttatcaggttttgaatggaaactcatcctggacatctagccgccctctaaactttctcttctggttaggatctccgctgatattcgctacgatatggtcagcagctattgcagtgttcatgccattgaataactttgcaaaaatcgttttgataagagaatcagtgtttccgagtgatgtggagcttgacaatattggattttgcggggcgctgttttatccaaaatctgaggatggtacagaggtgatcaactgggattcaatgagaggagtcgccgtgactacgactatactgataagctctgaaataaccatgttcttctttgcattgaaatgcttcctggccaccaagtcactaatgaatcaatccggccactcaaaaaacttccgtcatcttcaatggcaattgttttacgccctcgctctccagacccttatcccgatcacactgattcaaggcccattctctacaatttacatgaccacattgcttctagactgttcaactccattgttcggaaatttcttagcattttccatcacattgtacttggcgatagacgcacttccaactattttcatcattaagcactatagacaagccatatttgggtatttcaagcagttcaaaatagtgcgagttcaaccgaaaccgtatcaggtatcaacggctaatatccatcgcagcagcgtctactaa

SEQ ID NO: 385 - DNA, 1068 bp, Caenorhabditis elegans
atggcagagctcagcccattttccatagatccatggatgcccataatccatagaatggaacgtggatttgcgtgttttggaatcctcctgaactgcatattgctatcgatgatagtacatagatcgccgagtgaaattggcgtttacaagtacctcatgatgtacattactatcttcgagctattttttggtgggctggagatcataacagtacctcaatttcatacaatgggctcccaatttttcgttttcattgtgccggaaattattgaaatgtcggattttgtgttgcagatttctgcgatgatttactgcggctcatttgcaaattcactggcaattttcgcagttctgtttgcttatcgatatcaagtcttgagcggaaacacttcttggacatcattaaaccttcgaaatgccatgttctggggcaccgtacctctattcgtaggactattttggacagtatccaccagaatttttttaggccggaacacattctttgacattgctttaagtcgagacccgtcactggcaaagtttcaaaatatccgattcggatttattggaagcttcttctacccgcagcttgccgatggaacaaaagtgatcaactgggactcgtttatcggaatggctttcagcacttgtattctttttggatccgagtatctgatgcttttctacgcagtcaaatcatacctgcttaccaagacactcatgcaatcagcatgctccgccatctataaaaaacttcagtggcaactattctacgctcttgtttctcaaacattcattccaattctgcttatgcaagttccaatgtctgcaatcttcgtttcaatattttttgacatgtccaccccaactcttggtcatattcaaacctttactatttcaatttacctggcaactgacgcgcttcccacaatgttcataatcaagccctacagggataaaatcatatatagaattcagtgcatcgcatcaatcttcaaagcagtgctgccaggtcagagtagaaccaactcttctgtggtggaaatgtcgtcgagacatatttcttaa

SEQ ID NO: 386 - DNA, 966 bp, Caenorhabditis elegans
atggtgctgctcaacgactcgagtctatggcaaccgtcaagtgtaagtccagagaaagctacaacatttcaaggaattgaacgaggattcacttgctttggcatgttctgtaaccttgtcttacttccattaataatgttcaaatcgccaactgatatgggggtctacaaattcctcatggtgtacatcgccgtttttgagttatttttcggatggttggagctgatgactgtcactaatttgtatacccaaggttcattgttcactgtcgtcgttgatccggacgaggcatttcttccagatggtttactccagatttcgtgcttaatctactgtggatcgtttgccacatcattggccatgtttggtgttcaatttgcttatcggtatcaggtgctcaaaggccaacagtcctacccgatttccctggaaaacaaaactgtcgggtttgttgcagtatatttctacccaggactagcagatggaagtaccacgatcaactgggactcattcatcggcatgtcactctgtacttgcattctatttggttccgaatctctaatgctctactttgctctaaaatcctacctcgtcacaaagtccctcatgacttccgcttactccgcaaactttcaaaagcttcaatggcaactgttctacgcgctcgtgtcccaggctgtgattcctattttcttcatgcaaatcccactttctgcaatttatattaccttgtttgccaacatttctacaccatttttcggacatcttcaggaattaacaatttccttctacctagccactgatgcgcttcccacaattttcattataaaaccataccgagagtttattttttcaacactccgctgtttgaaattatgcaaatctgccaactctgcaaaccaagtgggaacgcacacggccatttcactagctgacattccttctagatacatcgtttcatcatga

SEQ ID NO: 387 - DNA, 999 bp, Caenorhabditis elegans
atgagctggacaagtgttcaatgtatactccaaaaagtctgtacccccattgcaataataattaacattattttaattcaactaatttggcacagatcaccaaaagctattggtttctacaaatacttaatgatttacatctcggtttttgagattctctactcgctacttgatatattagctgctcccgattttttcggtcatgattccattttcatcgtaataacttcgtctgaaaaaatgattattcccaaagttttccaagttccgttcacaaatatattttgtgcaatgtttggagtttcgctggcaaattttgcaattcattttatctaccgatatttggctattattaaaagccctttactagaaccttctgtgaaattggcaatttggttttttattccgattatttatggagtcacgtggtcaggtttattaattgcattccttcatccttttgaggaaacagatacaattttgaggaaaacatatttactcgaacgcaatttaacgttgtctgacataacttatgttggaacaaactattggattccaactgataatgggcaagaagttctaaatctaagaatcggaatcgggatgactctaattatgtcattggttaccagttcaatagttacaattttagtttttgcaacactgtgctatcacaaaattgagtctcttgttaaagtatccagtaactccactcaatatcgacttcttcaattacaactgctaaattctctagtcggacaggcgctgatcccagctgtattgatgcttggccctagttccactgcattcgtctctccattttttcacgaaggaagtgaatcaataggtgcattatttggaattacaatttcgttgtatccagcattggatccacttccgacaatgtttgtgatcaagagctatcgagaagcaatattcggatgctgccggaaaaccacaagagttcacgcatcaaggacctctacagcagcttcttga

SEQ ID NO: 388 - DNA, 1047 bp, Caenorhabditis elegans
atgttcccatattatcacattgttgaacgcgttatcggaatttttggaataattataaacgccactttgatctacttgatagcgaaaaagacggtgactaaactgggcaactacaggtttttgatgatgcatatatccttatttgagcttgggttttccgtccttcatggaattactgtccccataatgtatacatcagaatgtatgaactttttagtattgcgtgtcgacaaaagtttgcttccaaagcctctacttgaacttcttgctgtcatattctgtaacatgttcggcatgtcaatttctctatttgcaactcaatttatttatcggtatctggtgttaagcagaaataaaatgcttcgtcaccatgatggtcgtacaattgtgtacatgattttgttcaacttactttttggtgcagtttggggagtattagcttggttcacaatgagcccatttccggaagctgatcaaatattgagtgaaaatttcgctttgcccaacggtttgagtatagagcaagtagcatatgttggattcatattttacatctctgacgaaaccagcaacaacctacgcgtacattgggagtctgtgattggaattggaattcaatgtgttttcataagcatttcattttgcctaatattcatatttgggttcaagtgctaccgacaaactcgcaaattcgtatcgtctcaatcaacaaacgcaatcaaccttaactcacagttattcaatgctctggttctacaaacaataattccaatatgtttgatgcattttccagctaccattgtatatatggcagcaggtttgaacaagtcaaatgagatctttggacaactactgtccctttttatttgtctttatccggttttggatccactgccaaactttttcataataaaaagttatcagaaagttgtgaaagatttctactcgaaaattcttcgaagacagccacccagtactattgtgcgacctggttcaaatcgaacgctggcatttcctaatgcttcatctattgttcatttgacatga

SEQ ID NO: 389 - DNA, 1035 bp, Caenorhabditis elegans
atgctcacgaaaataatttttaaacgagtttttgcgatttttggagtagtcaataactttttattgataatttttataatattcaagtcaccaaaacagtttggaaattataaatgtttgatggcttatatctctatttttgaaattttctactcaattctggattttctgacggttcctacaatttatagccacaactctgcttttttggttatcatcgaaaaagattcagcgatttttccggattctctacttcaagttgctaacatatcgttctgtagtctatttggcatgtcaatggcaatttttgcaattcattttgtctacagactcttggtgatgattggacctaagtatctataccattaccatttgcaaaaggtacttggtcttattggatgtacaattattgtgggatgtggttggactgtggtcatgcatattagtttcggtccaactaagtattcggattctttaataagcctggaataccttgaacccagaaatcttactctgagcgatgttgattacgttggagcgcactttcatcatacagatagctatggaaatcaatttattaattggaattcaatgattgcacttgtcatgatgacaattgccataatgctcagcttcactactgtaatcctctgtggcttaaaaatttacaaagatgcgcaggaaaacttgtctctgaggtcctcaaccgataataatattcagtctcaaatcttctgggctctggttctccagacaattattccagtagtacttatgcattttcctgctggaattggatatttattttctatgctgaatcggtcaacagagatattgggtgaaatcccggcgattaccatttttatgtacccggctttggacccgctacccagtttctttattattagaagctatcgggaagctattttggaattacttggatgtaaaaagtctgaaatgagtgttataccgacggaaatgagccttcaagtaataagaacacccgctggaaaaactccagaagaaaatcgctga

SEQ ID NO: 390 - DNA, 1035 bp, Caenorhabditis elegans
atgttctcaagctctcgtgaaatttttcaacgaacttgcgcgttttttggaatttttaacaactccattctggcgctactgatcttgtatagatccccaaaaaagttgggcaactacaagtttttgatgatgtacatctcgatttttgaaaccctgtactccctgctagacttttcgacgatcccggagatattcagcaaagactacgtgtttttgataattattgaaaagcgattgacagttttgccaaattttttattgcaatgcgctttgattatcttcggcagtcttttcgggatgtccatggcgattttcgctattcattttgtctatagatacctagttatgactggaagccagttcatcaaaacccatcatcttttaaaagttcttggcctaattgggttcacactttgcatgggcgtcgcctggagtttcctccacagttcatatcacccaattcctcaggccgatatttttcttgacgtggaatatttgaaaccaagaaacttacaacttaccgaaataagctactcgggcccatgttttcaagttcaagacgagaaaggcgttctccggatgaattgggatgtagttggaactactggagttatgattctactcattagtctcagtttttcaacagtcttctactgcggcatttccatctacaagaacatcaaatcaatgacttcaatgagatcctccctggaccaatccctccaatctcaactgttctacgcccttgtatttcaaaccctcatcccagttatcttaatgcatattcctgcaagttttgggttccttgtctcaattttcggtaattccattcaactcttcggacagctccctactttctcaattttcttgttcccaatgctggatccactcccaaactttttcattatccgaagctaccgccaggctattacagaatttttcggatgcatactgtctacgacttccagccataaaactgactcaaatcataaactggaaatgcgaccaagagctgctgcaattgttgtaaattga

SEQ ID NO: 391 - DNA, 1038 bp, Caenorhabditis elegans
atgttctcaaactatcgtgaaatattccagcgaacttgcgcttttcttggactttttaacaattccattctagctctgttgattttgtataaatccccaaaaaagttgggtaactacaagtatttgatgatgtatatttcgattttcgagatcatatactctctgcttgatttttccacggtccctgaaatattcagtaaagactcagcgtttttgatcactattgagaaacggttggcagttttgccggacattgcgctgcaatttgcgttaattgttttctgcagtctttttgggatgtccatggcgattttcgctatccattttgtttatcgatatcttgttatgactggaagtcacttcatcaaaacccgtcatcttctaaaagttatcagtctaattggattcacactttgcatcggggtcgtctggagtttcttgtgcattttattccacccaattccgcaagccgacctgattcttacccaagaatatttaaagccaaggaacctacaactcgccgaaatcgactacttgggcccatgctttcaagttcaggacgagaaaggagtttaccatcttaattgggacgcggctggaccaattggaataatgactgtgcttattggtctaagcttcatcacagtattctactgtggctactctatctacagaaacatcaagtccatggccgctatgagatcgtcggtcgaccattctctccaatctcaattattctatgctctagtctttcaaactctcatcccagtgatcctgatgcacattccagcaagtttgggattcctcttctccatgtttggccagtcaatattgttcttcggcgagctcccgactttttcagtatttctgtacccaatcttggacccgccccccaattttttcattattcgtagttatcgtcaggctatcttggatttctttggatgctttttaagaaaaccgtctccaaattccagcaacaatcaaagcaacccaaatcaaatggaacttcggaatcatgtggttgcttcaaactaa

SEQ ID NO: 392 - DNA, 1089 bp, Caenorhabditis elegans
atggataacgaaaacaactcggattccttctcttattatgtaacatttgctcagcgagttgctcaatttgggttttttgcaactacgacttcatgtactgttcttattctcttaacaatttatggcgtaaaacgggatttcggaagttataaaaatctattgttaatgtttgctgggctaggaattgtatttgcaaccactgaagttctgttgttcccgaatttacactcctacaacgctggatactttttctacagtatggagcgcccattcagattagacactaaaaatgtctcccgcttccttgtaatttatacaggcctctatggatcgacaatttgtttgctctctgtccaatttgtctatcgatattgggcagtttttagtgaatcaaaactgaaatttttcaaaggttggaggttcatattttgtatcatgtattgcgcagcttttggagcagattggggattgtcaatttattattttgatgaaatggatgcctacgctgatcattatttcaggtgggccttgattttgtcggctgcgctgttccacaaaaaaaattccagagccgaaatgcataaaagatatcgcctaaacattagcgaggttgcgtgcttttccctggttgcctacaactttgataatacccctagatggcgtaacatattatgcacaatttctctattttgtattatgctcattcaatacacgataataatctattgtgcgacaattatgtatctgaaaatggaagaaaaactgaaattattatccgtctcaataagaaatctacacagacaattctataaaacattggtaatccaaatattcactccgaccatttgcctattttctcccttgatttttataatttttcatccacttttcaacgtggaaattgttgtgccaactggaatgctgttatgtgcaatcacgatatatccagcggtggatgcaattatcattatgtatgttgtaacagattataggaacgctataaaaaagaacttcaaaaaagtgcagcagaagctcttgtctcaacgaggaatgtcaacgattttgataagaacaactcaatctgtttga

SEQ ID NO: 393 - DNA, 1026 bp, Caenorhabditis elegans
atgagctttcggtcgatttttcagcatatttctgcaggtttcggagtcctttgcaattttattttaattattctgattatcaaaaagtcaccaaaaactctaggaagttacaagattttaatgatttacattgcaatttttgacattttctatgcagttattgacgcactgatagttcctaaaatgttcagctataattcgggagcttttataattgtttctacaaatgaagcgcttctaccaaaaagttggcttcttatagcaaacttactttattgcacattctttggaacatcgatggctgtgtttgctgttcattttgtttaccggtatttgacagttattggaagttactatatcaaaaattatgaccgacaaattatcataacccttatgacatttcctgttatcttcgggttggtgtggttttggatgactcacttcaccctcacagcatctgacgaaacggagcaatttttcaacaagtattattacggtgttcacaatagtgcgtcagatattttctacgtgggatattatttctacccagaagatgcatatggaaacaaggcattacactcacgatcttttagaggatttttattccaatcaacttttataacttcctcatttggattaatactctactttggaacaaaatgtcatcttcacacaaaatcattatcctccaaaactgtcacttcttcttcacgtttctctcttcaatcacaattattctatgcactggtgtttcaaactatcattcctgtatttcttatgcatattccgtcaactatcagcatgtgtgccgcattcacaaacatatcaattgagttcatcagtcaaatcctttcctgcacaatatctttgtacccggcacttgatcctcttcccaactttttcataatcaaaagctatcgaaatgctatcacacaatatttaacagattttttgagactgttaacatgtgggaagaaacatcttaacgtgattcatgtgcaaagtagaaacacgtcaaaaatatga

SEQ ID NO: 394 - DNA, 1074 bp, Caenorhabditis elegans
atgagctctgttcacactattctacagcgaatttctgcgttctttgcagtcttaaataatcttattctgattgttctaataattttcaaatctcataagaaaattggtaaatacaagtatttgatgatctacatctcaatttttgaaattatatatgcaatactggatacgtgtgcagttccggagatttatacaacgggaagcgcatttttggttactgttttaggtggacaatcgtttttaccaacgtatctttgccttcttctttccgaacttttttgtgtcttgttcggaatttctatggctatttttgctattcattttatttaccgatacatggttgtaagcgaaaataaatatctgaaaaagtatgatgcacacgttatatctttcttgctcatactcccattacttttcggggtcttctggttttgggttgttgattatttcttaacacccttcgataaggctgacaagattttgaaagaacatttccttgataaaatgaacataaatctgactgacgtaagctacgtgggaccgtatttttggccaatcggtaaagatgggaaaacgtatgtccaatggaagtcaatgtttggaattctgatcatgagcatagctatcactgtatcattttcaaccatttttgtgtttggatataaatgctatcggaaaaccaacgagcttatccaaagcgcatctcaatcggaatcctttaacaaactacaaacccaattattctactcacttgttttacaaactcttattccagttgtcttaatgcatattcctgctacaattggattcggcgcttcattttttggtgtttcttttgaatttcttggcgaaatgtgtgcattcactatttgtctgtatccagctttagatccacttcctaattttttcattatcaagacgtatcgggatgctattcttaaatatctacgaaaattcaagagcataatattatgcaaaggggctacggtagacattgaaattgttgcaatgtccgatttaggatcggcttcaatgacgcccaaaccagcaagcttagccgctccaataaactaa

SEQ ID NO: 395 - DNA, 1065 bp, Caenorhabditis elegans
atgttttctgaaataagagtcatttttgctgaaaaaaccagggcgttgttccttgatgcttcggcattttttgcaatttccatcaactttatattaataattttaattctcacaaagtccccaaaaacactgggagcatataagtacttgatggtttacattgcatttttcgagttagcttatgccgggctttatgttgctgaaaaaccaaccttttttaccaaagattctgcatttctgcttatcactaataccaaaaattcaatttttccgaggagaatttcaatgtttgttgaagaactttttattgggttctacggtttagcaatggcaattcttgcaattcatttcatttatcgttatctggcactcagcagcaatatttggcttcacacatttgaaagttggaagctcgtcctttggcttatgtttcctattgcaaacgctggaatctggtggtttgtggctgccgttatttttgctggaaaagaagactcggacagatatttgaagaaattctatttaccattggctcaacacctagttaattttgaggacatatattgtattggtccgttttattacttgaaagatgtcaatggaaagtcttatataaactggatatcgtttcaaggaacggcgatttccttatcactaatttgtctttcgttcacgacaatgatatattttggctcaaaaggttacaaatcaatgagcgaattgatgagcctctccaccgtatcggaccatgtaaaaaatatccattctcagcttttcaaaaccttaatttttcaaaccatgatcccagtgctcctcatgcatattcctgcaactgtcacatatataacatcatttttcaacgtttcatcggaaattttcggcgaaattcttgacttgagcattgcactttacccagtgctaaacccgctgccaacgatatttattgtcacaagctatagaaaagctgttattgatttattatgttgccgaaaaaaaattgttccactctcaactgctgaagtgactaatcaaatggcaactcaacctatggctagtactctttaa

SEQ ID NO: 396 - DNA, 1062 bp, Caenorhabditis elegans
atgaaaatcgacgacattgtttttctgaattcatcggccgttttcgcaattgctatcatctttctactcatatgcctcattctcaaaaaatctccgcaatccttaggatcatacaagtatctcatgatttatattgatcttttcgagctggcttatgcttttttgtattttttggaaaaaccgaaacttctgacaaaagaatcggcatttttcttgattgtcaattggaaagaatcgttgtttccaaagtttgtagtttgcgttctagacttactatttgttggttgcttcggattttccatcgcgattcttgcacttcacttcatttatcgatttttcagcattacaaacaatcctcatctcaaatcctttgactcctggaaaattgtgctctggtttatgattcctgctttaaatgggctcgccttcatgtgcacgggcggtattctaatgagcgccgacccacagaccgataggtttttgaatgaaaattatcaagaaatttcggaaaacactacatcattggaagatctttattatgtgggcccacttttttggccgaaacatgacaactctacaactgagcaatatttcagctggaaagctgcaaaagcttgtataattgctatgggagtcattactatatctagctcgataatgctatattttggtgtgaaaggatatcgaatgatgagcaaactaattgctacagcaggagtctcctacaaattcaaaactatccagaagcagctgttcattgccctcctttttcaaacagcgattccagtctttctcatgcatcttccagcaactgcaatttacgttaccatatttttgggcaattctaaagaaattattggtgaaataatcagtctaacaattgcattgtatccggctttgaatccgattccaaccctttttgtagtgaaaaactatcgaaaagcaataatagatgctttctgttatttttttaatatagctggatgcgggcaaaaagtggtacctatgactataactgcaactgcatccacacgaaattcgaacatattggaccggagttaa

SEQ ID NO: 397 - DNA, 1059 bp, Caenorhabditis elegans
atgcagctcaacgatgcaatatttttgaacgcttctgtaatttgtgcgatttttataaattttgtcctgatacttttgatactcaaaaaatctccagcatctcttggagcctataagtacctcatgatgtatatcaacattttcgagctgacctatgcgattttgtattttgcggagaaaccgattatgctcacaaaagagtctgcatttttaataataatgaactggagagcatcaatatttccgaaatatgttgcttgcactctaaatctgcttttcattggcttcttcggtatgtcagttgctattctggcccttcatttcatttatcgatacctcagtatcacaaagagcaatctactgaaaacattcgattcgtcgaaaattgtgccgtggtttatgataccattgctgaacggaataacgtttatgtgtacagcgggatttttaatgcgagccgacgagcaaactgatagatttataaatgaaaactatccaccgcttgtcaaaaacctctcaactatcaatgatctctactatgtgggcccattgttctggcccaagtacgccaactcaacaaccgaccactttttcagttggaaggctgcaaggttatgcctgattgcgatgggcttaattggattttccacttcaataatggtgttcttcggtctgaaagcatatttggtaatgaaaaacttgatgtcacagtcaacttcttgtgacaagttcaaaagcattcagcagcaattactacttgctctaattctgcaaacttcgattccagtcctcttgatgcatatttctgcaaccgcgatttacctgacaatatttttgggaaattctaacgagattataggagaaaccattggattgacaattgcattgtatcccgctctgaatccaattccaacaattttgatcgtcaaaaattatcggactgtgttgatcaatatactggcttatgtcaaacgtcgagtattccgacaaactgcggtgactccacttgtgttggcggatgtaacaacaatcgctatgcaaaatttggccccgaactag

SEQ ID NO: 398 - DNA, 1059 bp, Caenorhabditis elegans
atgcaactcaacgatgcgatttttctgaattcctcggtaatttgcgcgatttttataaacactgtcctaatacttttgatactcaaaaagtcgccagcatctcttggagcctataagtatcttatgatttatataaacatttttgagctaacctatgcgattttgtattttgcggagaaaccgattatgcttacaaaagagtctgcatttttaataatcatgaactggagagaatctatttttccgaaatatgcagcgtgcactctaaatctgctttttattggcttctttggtatgtcagttgctattctggcccttcattttatttatcgatacctcagtatcacaaagagcaatctattgaaaacattcgattcgtggaaaattgtgccatggtttatgataccattgctgaacggaataacatttatgtgtacagccggatttttaatgcgggccgacgagcaaactgatcgattcataaatgaaaactatccaccacttgtcaaaaacctctcaactattaatgatctctactatgtggggccattgttctggcccaaatacgccaactcaatgaccgagcattttttcagttggaaggctgcaaggtcatgtctgattgcaatgggcttaattggattttccaactcaattatggtgttcttcggtctaaaagcttatttggtaatgaaaaacttgatgtcacagtcaacttcttctgacaagttcaaaagcattcagcagcaattactacttgctctaattctgcaaacgtcgattccagtcctcttgatgcatattcctgcaaccgcgatttacctgacaatatttatgagaaagtcgaacgagattataggagaaaccattgggttgacaattgcaatgtatcctgcgctgaatcctattccaacgattttaattgtcaaaaactaccggactgtgttgattaatatactggcttatgccaaacgtcgagtattccgacaaactgcggtgactccacttgtgctggcggatgtaacaacaatcgctatgcaaaatttggccccgaactag

SEQ ID NO: 399 - DNA, 1044 bp, Caenorhabditis elegans
atggagatcaacgagaacgtgtttcgtgttttatcagcttgcgcgatttccatcaactttttgctgataattttgatactcagaaagtctccgaaatcattgggttcttataaatatttgatgctttatattaacttattcgagtttacatatgcaattttgtattgtatagaaaaaccggacttattcactaaaggatctgcattttttctcattgcaaacttcaagcaatctatattcccaaaattaatggcgtgctgctccgttttgttttacggcggcttctacggaataacactggcgattctagccctacactttatctatcgctttctcagtattaccaacaatcgtcatttgaattcattcaattcctggaaaataatattgtggttcatgggacccccgattagtggaatcattttcatgctcaccggagcgtttatcatgagctccaatggagatagcgataggtttctgagtgaaaattacccaaccctgcttggaaatgaaacaaaaattgaagatttatattatgttggcccattcttctggccgaaatataacaactttactacggatcaatattttaattggagaacagccgggggtgcgatgattgttatgggattgattagcctatccattgctataatggtgtattttggagtaaaagggtaccgaagcatgaataaacttatagcacagtcgaattcgtcacaaaaatttcgaagtgtccaaaagcaactattcaacgctctggtacttcagactttcattcctgtacttttaatgcacattcctgcctccgcaatctattttacgatattttttgacaagtgcacagaatatctgggcaagatttttacgttgactgtcgccatgtatcccaccttcaatccactgcccactatttttattgttaaaaattatcggaatgcgttgaaagattcgttgatatgtgtggaagatgcagttttgcggcgatcaagaacggtgcatccgtcttcaacggcgtattctgttaatacacaagtttcgtaa

SEQ ID NO: 400 - DNA, 1056 bp, Caenorhabditis elegans
atgcaaatcgacgacgcaattctcttgaacatttccgcattttgtgcggtatctatcaattttctacttattctccttattctcaccaaatccccgaaatccttgggttcctacaagtttcttatgatttatatcaatttattcgagtttacttatgccatattgtactgtgctgaaaagccggatcttttcacaaaggagtcggcgtttttcctgattgtcaactggaaagagtcgttgttcccaaaattcattgcatgtattttggatttacttttcgttggcttcttcgggatttccatcgcaatcctggcgctccattttgtttaccgatttctgagtatgactaataaccatcatgtcaagtcatttgattcgtggaaaatcattttgtggtttatgattccacttttaaacggggtaacttttatggtaaccggtggaattattctgtgcgccgatcgggaaactgataggtttatgagtgaaaactatcccgaactcgtggatgatacaacaaatatcactgatctctactacatgggagcatttttttggccgaagcttgagaattcgcagacggaaaaatactttagttggaaaggtgccgaggggtcaattattgttatgggattaattggattatcaagctctataatggtatactttggtgtaaaaggctatcggagcatgaacaagctcatctcccaaacaacatgctccctgaagttcaaaagtgtccagcagcaattattccacgcattggtctttcaaactcttattcctgtattcttgatgcatattccggcttctgcaatctatatcactatattttttggaaaatcttcggaaattgtaggtcaaactctgagcttgactattgcaatgtatcctgcgctgaacccattgccgactatatttatcgtgaagaattaccggaaagctgtgaaagaagttctcatgggctttcaaaataagattaccggcaaacaaagggtatcgcaaataacctcaacagcgttttcaacacagagtgccagacagacgaatcaataa

SEQ ID NO: 401 - DNA, 1062 bp, Caenorhabditis elegans
atgcatcttaacagcaccttaatcctaaacttgtcagcggtctgcgcagttcttattaatttccttttgattgttttaattctgaaaaaatccccaaaatcattgggctcatataagtttttgatgctttatattaaccttttcgagttctcctacgcaattctatactttgcagaaaaacctgatctcttcaccaaaaagtctgcattctttttgatcgttaattggaaggagtctattttcccagcaaccatgtcatgtttaatggatctgcttttcgtcggcttttttggaacgtccatgtcaattctagctcttcatttcatttatcgatttttcagcgtcacaaacagtcgctaccttaaaatctttgactcatggctaattattcccattttcacagtccctcttatcaacggcgtcctctatatgattaccggtggtattattctgtcggctgatgcggaaacggatcggttcatgagagaaaattatctaaaagtaattaaaaatcaaacaaatcttgaagacctctattacatgggcccgtttttctggccgaaacttgaaaattcaataacggaaacgtattttagttggaaaggtgcggaaggctcattgatagttatggggtcaattggtctctctagctcgatcatgatattcttcggaattaagggatatataagtatgaacaatctactcgcaattacaagcaactcggaacagtttcaaaatattcaaaagcagcttttccaagctctatgcattcaaaccataatcccagtagttttaatgcatattccggcttctgcaatttatatcaccattttcttcgagaaatcttcggtaatcgtcggagaaactttgagcttaacgatcgcgatgtaccctgcaatgaatccgcttccaaccatttatatagttcaaagctaccgaaaagccgtgaaagattattttatttcaataaaaaatacacttttgaaaaagccaacggtgattcctgtgtcgcatactgttcaggtcatacccgtctcctcgattttcacgaccacaagttga

SEQ ID NO: 402 - DNA, 921 bp, Caenorhabditis elegans
atgctagcccaaatcccgttcaatattatatcatgcttatcactttttctcgacatcatccttatcactttgatcatcaagaaaagttcatcgtcaatggcaaactacaagtatttgatgcttatttcgagttttctgaaagtatttatcggagttctccattttataaatcaaccgaaagttcatttttatcaagcctcttacgttatttacagtgaaaatcctgttggattaccgagagctgtttcgttttgggttttagctctcgactgtgctgcatttgcgatgaccctctacttgctggcttttcattttgtctatcgatatttggcagatcttaaacccgatcaactctacttttttacattcccatattctctaattttcactggaattttctcgtttatgacattaaactggtggttgtcagctgtattttttgctggggaaagtggatctgtagatgaatatattggctcaaatatgcttcaaaaattcaatttaacgccggtggaattctcttacatttcgtcgatattctataaaaagaatctccaaactggagttgaagaactgagtttacacgattttttgcttctgatcaatttgatgttcataattgacacgggttttcttataatcggatattgttggttaaagcttcagaaagtattctcccataccaccaagcaatacctatcactatccaaacgaactctagaaatgcaaactcaactcttcaaatgcattgttgctcaaactctattcccaatgtttttcttgctcatcccatcaggatgtattctgctcttcccattatttaagtttgagccagggcctgtcgaaacaatattcttaccgatgatgggagcacagactgtagtagattctatggtccctatgtatcaggttgtcccataa

SEQ ID NO: 403 - DNA, 1023 bp, Caenorhabditis elegans
atgagaacgttttccttaataaaatcaataactcagccaattgccgcagtactgtctgttgtggtaaatttcattctgattacccttgtagttacaagttcaccgcggaaaatgggaagctacaagtatttgctgatatactgctcaggcttgtcaattgcatatgcagcatttcattttgttgcagcaccctacatgtttaatgacgactcaactgtagttattcttgtggatttgaagagtaatatgctagagaatcatccagatgtcttgaagttcactgttgtttccggagtggcattttttggaacaagtatttacgctatagcaatcaacttcatatatcgctattttgccgttcaaagagaaggccgcctccgatacttttcagggtggcgtcttattttctggattctcctgtccattattggtggagccatattagggctaatgttttatactataggttctcgtcaggaaatttcagacggtttgaaagtgagtttggaaactttgtatgatttgaatattaatcgcatattgtattgtacatttccgtattggttgcccaccgttgaaaatcagggattgacagtaaaagatattatggcaaatttggcaattacgatatcaatggcatttcctattctcattatcgccttttgcggaaccaagacttatggaaaagtcaagaatctgacagaacatggaaaaaatgaatactcaaagcggctccaattgcaactttacaaagctcttgtcgcacaggtaattattccaactatttttctgtttctccccactgtattcatcggggcaagtccactgttcaagcttaatatcccatgggctagtcttccattatcgatacttttttcaatgttcgcagtggtggattcaattccaattatttttcttgtggatgagtatagaaatgcactttttgcgttttttggaggattctgttgtgcaaatgaagttgtacccgcttcagttaatgaaaccagtaacgaccagcagtga

SEQ ID NO: 404 - DNA, 1062 bp, Caenorhabditis elegans
atgagcaggatggaagaagttctcgcagatgtgatatcatattcagcatattttgtcaccctagcgcttaacagtactttgatctacctgactaaatactgttcgactagactcacaatcatctatcgtcgcatgatcatcggttttgcagtttttgggatcggattctctacgttggatatcgtggtgagacctataatgcactcttacaacggatgttttttgtacttcagtttgaaaggatcatttcgttcgtcgaaagctatcacagaaatgcttctagcgatatactctgccgtctacgcagcgatactatcattcctcacaattcagtacatctacagagtgtgcgttttaaggtgtccacagttggtgcagtactttcgcggttggcggtttatactgtggcttggatacgtgttcatgtttgggcttgcgtggggagttatcacctatttttatgcgtacccggacgaatacgcaagggattatgtcagagaggaaatgtacgaacagtataaagtggattcggacaaggttgcactctttgtactacttgcgtatggtgaaaacaatggcacaaagtttgttcgtcctcaaagtttaatttgcatatttggacagatgggtatcatgagcctacagtacatgattatgatgatatgtggaattttgatttacaaacagataaaagcagatctaaaggagaccacaatgatactgaacagcaaatttcaaaagcaaatcttcaatgccttactgtaccaactagtcgctccatcacttctcgtccatcttccagcagttcccctattctttgctccattcttcgacatgaaattcagtttccgaactagagttgttgtctattttttcagtgtctaccctcttctagacagcctaattctgctcacagttgtatccgactatagactagcagtcagaaaaattgtggccaacaaagcggttcagctggttgcaatgcttaatgtgggtacagtgaccccaacaaccgccactaatcaaacagcggaaaatcgagttgcggaaaatgctctttga

SEQ ID NO: 405 - DNA, 1059 bp, Caenorhabditis elegans
atgacaagttcaggaattcagcggtgggaagaaattcaacatggattacaacatatctctgaagcaatttcagttattgtaaactcttttctggtttttttgattataaataaatcgccgaaaaaattgggttcctataaatatctgatgatctacatttctgattttgaaattctttattcctttgttgacttcgttgtggctccgttcttctactcatacggacctgcattgcttgtcattgtaaatttggaagagtcattgttcaataagccaattgcatttgttcttctctgctcatatagcggattctttggaacgtctatggcaatttttggaattcattttatatatcgatatcttgtggcaaccgggagcctgcttcttgccaccttttccacgtggaaaattgttttatggttgtcattcccaatattttatggagttgtttggggagctggtagctattttctatgtgcaccatcagaatatacaactgaatttgtgagagagaacattttgaataattttaatcttcaaatggaagatattgcatattttgggctcaatttttatggaaccgataataatgggaaacaattcatagtttacgagcaagttgttggaattgttgtcaatagttttattattacgtcctctctatctacggccgtgtactttggagtcaaaacctattacaaaataaatgaactaactaataaagtatctctaagaacaagtaatcttcagtctcaattattgtattctcttgtcgttcaaactatgattcctgtaatcttaatgcacattccggttacaattatttacacatttgctttcatgggtcatggaatgggaactatatgtggaattgcatcaattactataagtatgtatcctgctctcgatccacttccaacaatatttattatcaaaaattatcggaattatgttctcaatatgttttcatgttgctctgcgaaatatgaatcagaaaataacactgcttcaagagaagcagcagttatgcgacagaaccctaatctaagaaaaatataa

SEQ ID NO: 406 - DNA, 1014 bp, Caenorhabditis elegans
atgtcttctttacctatatacaatatcgctaagatattctcaacaactgcttgttggacaacaatgatttgcaattcgatattcatttttctcaccatggttcacttgaaaaaagttgacttaacctacagaaaacttctcacagtgttcgcaacacttggcatgtttttctcatttattgaaatgcaaatccacccgttctttcactcgtataacaacagtctcatcaatttcaatatggcagagcttccaaaagatctggcaactctacaagttgcttcatattccggagtctatgtcaccattgtctcattcttcacaattttgctagcattccgatattggaggatgactgggagcaccatagtcaactgttttaccggatggaaaatcatttttctcatcagctggcctttattttttggaatagctgcgacgggagtggttatcctgttcggaccgattgatgattacgcgcgcgagtatacaaaagaggttatgatggaaagttatggtattgccacggaaaatatctcgggatattctgtgattgcatatgaccaaaatggaaatcttcactggaatagtcttgcattcacctcgggaattatctcacttatggagattcagttcctcattgttggaattttcggatttcgaatgtatttcagaatgaacattttgcttcaaaatgtctcaaaatcatatgaaatgattcaaaggcaatttttcaaaagtttgatctaccagataacttcacctacttttaccttctacatacctgccattctcatactcacagtgccattttttgacttgaaattcaatcttcccactggccttattgtgtgctcattttcaatttatcctccaatcgacagcattattatgatgatagtcgtgtcggaatatcgagttgcaatcaaaaaaatctggaagaatccgaaaagtttttttggctgtgtttcagtcaatgggaacagtgcactggaagttagagttgtcgttctttga

SEQ ID NO: 407 - DNA, 1026 bp, Caenorhabditis elegans
atgtcatcacttcctttatatgaagccgcaaatattttttcgacgtcgggatttgttgcgacagtttttctaaacttaacgtttatatttctaaccatatttcatactaaacgcatcgacaccacttataaagaacttctaatagtattttcgattctttgcttgattttttcattcatcgaaatgttagttcatccgttctttcattccttcaacggagggctcataaattttaatatggtaaagtggaaatggctatccgaagaactgataacattcatcgtggtatcttattccggactctacgcaacaattgtttcattcttcactgtaatgtttttattccgatactggataatgatgagcagtccattagttggatttttcaaaggatggaagctcataattctgatcagttggtccgttgtttttggtgtgttcggtggaggaactgttctatattgtggttggattgatgattattcacatgattacatgagagatgttatgctaaaagagtataatttagatgttgatcatgtctccgggtacactgttattgcatatgaccaaaatgggaatctccggtggaagagtttagcagtcacactttgcctaatgttcgtcatgggaacacaatttcttattgttggaatatgcggcttccgtatgcattttaaaatgaacgagctgctgaaaaacttgtcagaagctcatcgaaaacttcagaaacagtttttcatgagcttagtgttacagataacttcaccaacattaactttctacatcccagctgttctcatccttactgttccgtttctgaacctcgaatggagttttccaacgggagttatagtgtgctcattttccatctatccaccgattgatagcctcattctaatgctaattgttcctgaatatagaaatgcgatcaaagcaatattcaaacgaccatccacgattctgaaccccaaaactacaaataggagtagcacggtgttttcacagaggaatgaagtggtttaa

SEQ ID NO: 408 - DNA, 1011 bp, Caenorhabditis elegans
atggtttggtttctcttttacccgtttgctgtacaagcctcaaaagtcgtttttgcctctaccgttcttataaatctatatctcatctacttaacaattgccaaaaccaaacgaatagctggatcctacaagtacatgatcatcatgttctcgacaattggaatcgtgttttgtttcatgaaagctagtcttcatccgtatcttcactcgcacaattccggtctcatgttctttagtttgggcccagattgggagaattttaagcaagtggaaactgggcttatggtatacactggtgtctactcagcgatgatctctttgctggcaattcagtttgtgtttagatattggacattgttcaacgacgaaaaactgaaatatttcaatacatggaggtgtgtcgtatggttcttatacgtctttttgattggaatgggttggagcttcatgatctatttttgtgctccgtcggaccgctattcgagaaattacatgcgagaaagtttattcgacacgtatcaaatggatgtggagaaaacagtcggtttctttgtggttgtaaggagagaagacaactctattcgatggcataacgttgcttttattggagggttaattttcgacttaataattcaatacatcatcgtcatctactgcggcaccacaatgaactcaaaaatgcaggagaaactcgccagcttttcagttgctaatcgaaaacttcaggagcaacttttcaagaccctaatcctccaaatcaccattccctcaattatcttccacctcccatttgtaccagtcctctgtgcacctttattcaacttggaattcgacttcgagtcaggaatgatctactgtctttttagtctttatccatcaattgacagtattatattgatgtcagtcgttcaggattatcgacaagaaatcaagaaatttcagagcattccaagtgcaatttctgaaagtgtgctcaaacgatttacgcagacgccggttgtgctcttttga

SEQ ID NO: 409 - DNA, 990 bp, Caenorhabditis elegans
atgattgacgctggtcagctaatcgtctttactggactttttactgcattttttgtaaattcctttttaatttacttgacattgttttatatcacatgcatccgaggaatttacaaatatatgatcgtatggtttgctttcggttgtataatttttgatttaactgaatttatttctcgtccacacattcacaatttcaacggcagcttaacatacttcagtcacacaattctttctgaagattttttatatttttggactattttcattgatatttacggcggaatgtactgctctttgattactataattgcggtgcagttcatatttcgatacgcaactcttctaaatgatacgcgcattttgcaaactttcaaaggaaaaatactctggctttgggtcttacttgtaattggtgttggagcactattttgtgtgactcctcttattatgttacagccagatgattatgctgatgaatatgtaaaagatgaatttcaccgcgtttattccagaaatattacagaaattgcaagattgatccttgtagcatatgatgaaaacaacaattttcgttggaaaaacttatcgtactgtttcataggagccataattttgaacagtctctactcaataattatttattgtgcgttaaaaatgcgacacaacttattgaaacaattggaacatgtctcaccggaatatcgaaaacttgaaaatcagtttttcaaaacaataataatacaaatcgcccttccaactatcttcctaacattcccaatgatgatattattgagcacgcctattctgaatcttgaagtcagttttaattcgagtatttatcattggggaatcagtttttatccgtcactggacagtattgctgtcatgcttattgtttctgaatataaagtgtgcattagaaaaattttcaaatgttctaacacagtcgacaccactaatcaaacttcgttaacaaattttgcctga

SEQ ID NO: 410 - DNA, 1020 bp, Caenorhabditis elegans
atggtaaaaatgactgctgcaactgttcttccattcattgctgaaatatttacaagagtcgggtttgtctgtacttgtctattcaatgcaatcctgatttatcttaccgcattccatgtggaaaaaataacaggggcttataaacatctgatcatcctgttttccctgatctgtatgtcattttcttgtctcgaagtactggctcatccatatttgcacagtttcaattcaggatttatttattttagtctgaatgactatcttggagcctcacagaaactgctcagattctttattgaagcctattcaggagcctatgcaagcatcatgtgcatgctcgccgttcagtttgtcttcagatatgccatcttgatgaaccgtcgaaccttaatctcctcgttcactggatggaacttccttatctggatcctctatccgtcgtcttttggcgtgactttcggtttcatgacccatttttgcgctcaagcagagccatattccgatgattatatgaaaaaagagctctacggagtctataatttggagatcaatgaaacggcccgcttcattgttatcgcttataatgctgatggaaccatgcgatggtttaatttgatatttttgttcggatccatgataattctcggtttccagtacgccgtgattatctattgcggggttcagatgcagaagaaaatgaagaaggaaatggcaaacttctcagtgagcaatggaaacttgcagcaacaattcttcaaggctttagttgtacagataactcttcccaccctcctcttccaccttccggctcttccagtcctattcaccccgttcttcaatgtcagcttcacgtttcaaaccggatttatctacgcagtatttagtctctaccctccaattgagacgattgctttcatgataattgttaaggaatacacaaacatttttagaaaaaaagtgctacgaagaccttcagctccagattttcggaagcgatcatcggatattagcgttttctga

SEQ ID NO: 411 - DNA, 1116 bp, Caenorhabditis elegans
atgtcttccatgttttgggtcggagcatccttattggcatcagaaatcggcttcttctccacgttaattgtgaactcttttctagttcatctaattattttctatacgaaacaagtgttcggtgcgtataaatacctagtcttatcgttttcattaatgggtattgtatttgccactgcagaatttattgtcaaaccgatgacgcacaactacaaagctagtttcacatttttcacactagaaaggccattcaaatgctccaaagaaactgcaatgatacttttagctgcctactctagtacgtatgctgccacaatatccttattggctgtacagtttgtctatcgatattgggcaatatttcatgttcgccggctaagtttcttcaatggaatttggatattgttttggattttcctcgcaatgatgttcggtgtagactggagctgttctgtatactttcttggaatgcctgataaagtctcggaagactacttaagattagaaatcagtgatcaatacaaccttaatataactcgtctcgcctacttttcagctgttgtctacgattcagaatatcatatcagatggcgaagtgtcatggttatgggtagtgtgtcaaaagttttgtcaattcaatacgcagttatgatattttgcggagtccgaatgcatttcaaaatggcagaaaaaatggagcaattctcaattactaatcggaaaatgcacaaacagcttttcaaaaccctcgttgtacagatcacagtaccaacattcacaatcttcatgccagtcatgttcatgtttttaataccattctttgatcttcaacttgggattccaacgggagtgttgctgtgtgcattatctttgtatccattcatcgatgggcttattgttatcagtattgtgtcagattatcgaaaagctgcaattgaagtattccgccgaatcctctcccgaataacatgtggccgtttcaaattgcatcaggtgaaaaaatacgatttctcagttagtggtggcggtgttggagctgatggaagtactgctggaacgattgctagaactaatagagttggtgtgaattctagaacgacagcttctactttttaa

SEQ ID NO: 412 - DNA, 1008 bp, Caenorhabditis elegans
atgatgtcgttttacgatttttttgaagtgttcactaaagttccgattttcattacaattgtttcaaactttttgcttatatacctcacaatttttcaagtcaagcaaatagtcggaacctataaatatatgattatattatactcagtttttggaattgggttctcaatttgtgatcaaattgcgaaacctttcattcatagctacaacggctacaaatctttattatatttcagttatggagaaggttggtttgaggcttcattattcgttcgtctgggtgctctagttatgtatgctggattttatatacttattgtagcttttgctgcggtgcaatttgtatatcgatatttagcattagtaaacccagacttgacgaaatggtttcaaaaatttggagttattttttggatattgtatccatttttgtatggagtcgtaaactctttatcaattctatttttgacgtcgccagacggctttacggatgactatttacgagctgaaatcattgaaaaatatgagctggacatcgaaaatatagcccgattggtaatgattccgtttgatacagaaaaaaatttaagaataaataacacagtctacctattcacagtaacttttttcatcacttgtcagtacttgatcattatttcttgtggcgttcaaatgcacctacaaatgaataagaagcttctcaaattttctgtgcccaaccggaaacttcagaaacaatttttcaaagctcttcttgttcaaattacaattccagcaatattatttgtgcttcctgcagtaccatttatgatcggcccatttttcaatattaaattcactttgaaatcaggagctgtttgtgcattgcttggaatgtatccaccgatcgatagtatagctttcatgattattgtatcggaatacagaacattgatcaaacgaaaactaacattaaaaaaaacacttggagaatgtgacttgactgatgttttaagtgcgttattctag

SEQ ID NO: 413 - DNA, 1035 bp, Caenorhabditis elegans
atgcatatttctcatgaattttcatacactttcactcaaatcggatttgtttctacgttgatattcaacttattgtttctatatctcactgcttttcatattaagaaaatcactggaacatacaaacttatggtccttattttcacttttattggaattgttttttctgcttgggagctagttgctagaccatttgctcacaattacaataaagcgttgatatattttagtctaaattcatggctacaggagtatccagagtttctccaatttgctataatactctttgcaagcttttatttggttattttggcaattattgctgttcaatttgcttttcggtacttcactctctgtaaaccacatctttccaaaaagtttggtggatacggagttatagtttggttgctctattcactcatttctgggtttatatatggaggtgcattaggctatttcggatatcctgatatctattcagatgattacatgagtgacgtagttgaagaatggtacaaccgcacaataaccagcttcccgcgttttcttataattccttacgcagcagatggttctgtgagatggcagaatattgattttttgatcgttggagtttttattttggaattacaatatgccataattatttattgtggtgttcgaatgcatacaattcttcaaaaagaacttcaacaacaatcaattgtcaaccaaaaacttcaaaaacaattcttcagagctcttgtagtacaaaccgttgttccaacattcttgttcgtgcttccaatagctccatttttaattggtccgttacttgaaccaattattgaaatcggaatgaactttccaactggatggatgtatgttatattgactatctattcacctattgatacaatcgcatttatgatgattgttcaagaatacaaaaaagctttgagagaagtttttcatccaattcttcctaagagagtcaaggtaatgagcgaacttactatgccaacaggcccaacgtccacttcccgagcaatttaa

SEQ ID NO: 414 - DNA, 1002 bp, Caenorhabditis elegans
atggagctccacgagctgtcctatatgttcacaaaatgcggattcggagcttgttttgttgtcaattcctttttcatttttctcactataacttcaattaaaagaatctacagtacttataagattatggtagtaatctttgcattgatgggaatcctatttgcaggatgggagactgttgcaagaccgtttgcccacaattataacaaaggatttttgtactttagccttagcaactcttatcaggcttctcgagaatttctcgagtttgctattgttgtatacggtagtttttatctggttatattggcatttatagttgtgcaatttatatatcgatatctgacactgtttaagccagtttatttgagaaaattcaaaggaaaagggatgattgtttggatgacatacccactgattgctggtgccgcgtttggaggacccctctattgttttggagttgttgatgagtattcggatgagtatttgaaaaaagaaattttcgagaagtacaaagtagccatcaaggatctacctcgatttgccattgtaacctatgactcagaaggctatttgcgatggaggaacatttcttatcttatcacttcaatttttatgatgggatctcagtacctaataatcattttctgtggaatccgaatgcatttgagaatgggaaaagagctcaaacagttctccgtgacaaaccgaaatcttcagaagcaatttttcaaggctctcgtatttcaaactctcgctccaactcttctgtttgtggtaccagcagctccaattttaatgggacctcttttcgatacagaaatgagtattagaactggtttaatatatgttctactgaacatttatccaccaattgatagtattgctttcatggtgattgtgtcggaatataaacaagttattagagaaattggaaaatatataacatcaacaaagccatcccgaaactctacgacgtatcaaatgacaagtatcagctga

SEQ ID NO: 415 - DNA, 984 bp, Caenorhabditis elegans
atgctccgctattttgaatatttggatattttcactaaactgggaatcttcacagcatccttctcaaacttcctgcttatctatcttactttattttacatccgacaaattcgtggaacctataagcaaatggttgtgatcttagcgctcactggaattgctttttccagctgggagctacttgctcgaccatttgctcataactataatcgagctttcgtgttttttagcctaaacacccaaaattccttatttcttgttcaaatttcggtggcagtttatgcaggattttatctcttcattctggcattttttgtagttcaatttgtctttcgctatgtaagcctggtaaatccaatttctacgagaaaatttggcggttttggatgtatcctttggatgggatatccgttgatttgtgggggtgtttatggcggtttgttgagctgggcaggaagtcccgacgagtattcggatgactatttgagaaatacatttttggattcttacgacttggatataacccagacagctcgatttgtcttaattccttatgcttctgatgactcgttacgatggcgaaatctatcttttatcatttgtggtggatccttattaaccgttcagtacgtcataataatcatctgtgctataaaaatgcactcggctatggagcgcgaactccgaaagttctcggtccgaaaccgaagtgttcagcggcaattttttcgagctctcatcgtgcaaaccttggtgccgacttttctttttgtggtacctgcgatgccacttctcatgggtccgttgtttgatattgagtgggatttgcagactggcggaattattgctcttttgagtgtctatccgccaatcgattcatttgtttttattatgatcgtgtcggagtataggaaagttgtgagcaatggtttgtgtcgaagaaaaaagatttccaatcattcaacagacgtcttcattatttga

SEQ ID NO: 416 - DNA, 996 bp, Caenorhabditis elegans
atgcctcatttttatgaaatttcggatagaatcgcaaaatgtggggttgccagtgttacaattgtcaacacattttttatatttctcactgtatttcatatcaggggaatttctggaacttataaaactatgattattattatggcagtaatgggaattttactttccattttggagttgttggctcgtccatttgtgcataactacaacaaagggtggatatatttcagtctgaattcttggatgaacgttcatgaaggttttctaaaacttacaatgatattctactcaagtttttatattgtaatgttgtctcacatatctgtacagtttttattccgttaccttgttttggtcagcccaaaaactgctaaaaaatttacgggaaagggtatattattttcgttatgtgtttcaatattttttggagttattgatggtgtagcgcttatgatttttggattatcagatgaatattcagatgagtatatgatggtggaaatgttgaacaagtatgagttggccattaaagattttccacgattcatcatagtaatctatggagccgacggttcactacgttatcgaaatgtgatgtacttagtgagtgctggagttgacgtcgcaattcagtacctcctaattattttctgcggaatcaaaatgcatttggtcatgaaccaaggattcaaaaatgtttcagtagcgaacaagaagattcacaaacaatttttgcgtgctcttatagtacaaaccattgttcctactgttttgtttgttttccctgcagtctttgtgttgctgagcccaatattagatctggaaatgagttttcagacaggatggatatatgctcttataagcatgtttccttcgattgactctattggcttcatgtattttgtgtcagaatatcgaaaagttattaaaaaaatatacttggcaatgattcccgaaaagagaagtgaccaatctgaactcgacatcaatccgtga

SEQ ID NO: 417 - DNA, 1053 bp, Caenorhabditis elegans
atggagtacattcggatggatgagctaacaaagcttatatcaaaagttggttttctatcaacaactattctaggaatgttgttcgtctgtttaacagtttgttttgtgaaacgggattttggttcttatcggaatttattgattgtattctcatttcttggtttcttattctccgcatctgagtatatgattcatccgatgattcacagctacaactctggtttcgtcttcttcacagaaccccacctatcgctagtttcaaacgaaatcatgaaaatcggattggtgttcttctgtgggatatacggatcaacaatttgtttcatatccgttcagtttttgtacagatactgggcgctttttgacgctccaaagttgatatggttcgaaggttggatgatgtcggcgtggcttatctacagctttggaataggtgccacatggtccattggaattcattatttcttggagaatgataacttcacgctgaactactttgagaatggggtttatgatcactacggatggaaattgtcggcgattccaagttttacattcgtaatttacactgagagaggagcaatccgctggaggaacttggcatgtacaattgagatgacaatgattattggacttcaatactcaattatttgcttttgtggcagaaaaatgagcgttggcatgaaagagaaaatttcaatgctgtcggagacaagtaaacgactgcatactcagttcttcaaggcgttgattctccagatcgtagtcccgacaattctcctattcttcccaatgatcatcataatctacctgccagttttcaatctcaaattcagttttcccaccgggatcctgttcagcgcattcgcaatctacccatcaatagatatcgccataattttgtacattgtctcggattatcgaattgctatcaagttacttttaaaatcaatcaaatccgtgttactatcttcaagctactttccgcatgaactttccctcccaacgtgcactcctcaaactcctctcccaagagggacggcacgcatctaa

SEQ ID NO: 418 - DNA, 1026 bp, Caenorhabditis elegans
atgctcaaccacaaatacacaatttccttcacaagtgccggcttagtaatctgtttcatcacaaacttcatattgatatacatcactttgtttcatagcaaacgaatttatggaacttataaattgatggtcgtaatgttttcagcactgggatttttattctccgtttccgaatttatcgcaagaccattcactttgaactataacagagctgtgattttgttcagtattaatgattggattctctcgaagaacttcctaagcattgcactttcattttggatcacattttatcttttgataatatcactcgttggagtccaatttgtatatcgctacctatacattttccattccacgaaactgtggtattttgatggggttgggagagcgctctggatttcttacttgttgattcctactatagtttatagcgttgcatttaatcagatatttacacccaccaatgcttccgatgattatttgagagaagttattcgaaaaaactttgactttgaaatttcatcagtcgcacgatttatcatgatgccttataatgaaaacaataccatccaatggaaagccctttcacttctcatatcagcgggaattctaatttgtttccaatatttcatttttgtatttttcggcctcaaaatatattttaatatgaagcttagactgaaaagtttctcagcttgccaggaaaaattccaatcgcagttgttcaaagcgctcgttgctcaaaccattggccccacaatatttctgattttgccttctgcgccattctttgtgacaactctactatcgccatataccaatatggagattaattggcaaaccgggtggttgtgttcgttttttgaattgtatccaatatctgataatatcgcatttatgttgattgtttccgagtaccgaaattatattaaaagtaaattggtctgcaaaactagaagagaggtcggcagcaagatttcaattcgagcaactcaattcattgcaaacgcttcagatacataa

SEQ ID NO: 419 - DNA, 1041 bp, Caenorhabditis elegans
atgttcaaccaccagcacacaatttttttcacaagcacaagtttgctaatctgttcaatatcgaatttcactttaatctacatcagtttattccatagcaaacagatccaaggagcctatagaagaatggtcgtgatgttttcagcactgggatttttattctcactttcagaatttatcgcaagaccctttgctcacaattacaacagagcattaattttgtttagtattaatgattggatttcttcgaagagctttctagagattgctatttcggtttggatgactttttatctcctgataatctcattcataggaattcaatttttatatcgctacatatgtctctttcattccgcaaaagtcagatatttcgacggttttgggacagtactctggatttcttatttattgataccagctgcagggtttaatattgcattttatcagctgctaaaaccaactgatacttctgatgattatttgagaaaagttatacgagaaaactatgatcttgaaatttcggcaattgctcgatataccttggctctttatagtgaaagcaatgttatacaatgggagattctttcccttattatagcagcaggaattgttctttgttttcaatatttcattgtcatatttttcggtgtcaaattgcacttcaaaatcaaagaaaaactgggaactttctcgccgtgtcaggtgaaaattcaatcccaaatatttcgagcacttgttgctcaaaccgttggtccgacattatttttggttttgccatctgctcctttctttctgacaactctattgtcaccttatattgatatggagatcaactggaaaactggatggctgtatactttaatcggaatttatccaatttttgatagcatcgcatttatattgatagtttccgaataccgaaattatgtcagaagtaaattattctgcaagaccaacaagagtcctcgagaatttggcaacaagatttcaattcatccaattcgatgcataaatactgaaattgtttcagacacgtaa

SEQ ID NO: 420 - DNA, 1095 bp, Caenorhabditis elegans
atggtgaaaacattccacgtcagagaatcgactatctcccaaatgcagtacattcggatggatgagctaacaaagcttatatcaaaagttggttttctatcaacaactattctaggaatgttgttcgtctgtttaacagtttgttttgtgaaacgggattttggttcttatcggaatttattgattgtattctcatttcttggtttcttattctccgcatctgagtatatgattcatccgatgattcacagctacaactctggtttcgtcttcttcacagaaccccacctatcgctagtttcaaacgaaatcatgaaaatcggattggtgttcttctgtgggatatacggatcaacaatttgtttcatatccgttcagtttttgtacagatactgggcgctttttgacgctccaaagttgatatggttcgaaggttggatgatgtcggcgtggcttatctacagctttggaataggtgccacatggtccattggaattcattatttcttggagaatgataacttcacgctgaactactttgagaatggggtttatgatcactacggatggaaattgtcggcgattccaagttttacattcgtaatttacactgagagaggagcaatccgctggaggaacttggcatgtacaattgagatgacaatgattattggacttcaatactcaattatttgcttttgtggcagaaaaatgagcgttggcatgaaagagaaaatttcaatgctgtcggagacaagtaaacgactgcatactcagttcttcaaggcgttgattctccagatcgtagtcccgacaattctcctattcttcccaatgatcatcataatctacctgccagttttcaatctcaaattcagttttcccaccgggatcctgttcagcgcattcgcaatctacccatcaatagatatcgccataattttgtacattgtctcggattatcgaattgctatcaagttacttttaaaatcaatcaaatccgtgttactatcttcaagctactttccgcatgaactttccctcccaacgtgcactcctcaaactcctctcccaagagggacggcacgcatctaa

SEQ ID NO: 421 - DNA, 1011 bp, Caenorhabditis elegans
atgatatcttacaagtattcaatcgttatttctgctttaggctttatactaaaccttattgttaatggtgtattcctttatctaactatattcaagattaaaaagatgcatggaacatacaagcgaatggtgataacctttactgtactcggcaccatattctccgcatgggagattatcgcggaaccatttgctcacaacttcaaaaactctctactctactttagctgtaacacttggctagggagcaagacctggctcaggtacatgttggcaatgtggtctgggtgccataccttgatcatttggtttattgcaatgcagttcatatatcgattggtgtgtttgattgatacaaataatataaagaagttggaaggaatatatggctatcttatgattatcgttccatttgtcattggtggatttttcgcggttatggtggaaacgctaattgccaaggataagatgttggatgataatttgagaaaactaatctttgaaaattatcaactactaatatcagagcttccaaaatacaatatcacaccctacaatctcgatggctcagtgaattggggaaattttggacttcttgttattgcggttttcctcaattctttgggctacctcgtcatactttattgtggagttcaaatgcatttgaacatgaaaaaggagctggcgaagctttcgatctctaatcaggacctgcaacggcaatttttcaaagctctaattgctcagagcattggtccaacgatttttttggttctgccaatggggcctttccttttgagtcccctaattcccggattaaatatcaattggcagtcaggatggatattttgtttagtaggagcgtattccccatttgataccattatgtttatgatgattgtgtcagaatatagaaccttgctgaaaaatcgagttggttatacagtttctgcagctactccagattatcgaactcaggatccggcaactactggagtacaaactaattaa

SEQ ID NO: 422 - DNA, 1011 bp, Caenorhabditis elegans
atgatatcgtacaagtattcaaccgttatctcggcattaggatttatactaaatctaattgttaatggcgtgttcttttatctaactctattcaagattaaaaagatgcatggaacatacaagcgaatggtgataacctttacagtactcggcaccatattctccttatgggaaattatcgcggaaccatttgcccataactacaaaaattctctactctactttagctgtaacacttggctaggtagcaagacctggctcaggtacatgttggcaatgtggtctgggtgccataccttgatcatttggtttattgcaatgcagttcatatatcgactggtgtgtttaattgatacaaataatataaagaagttggatggaatatatggctatcttatgattatcgttccatttgtcattggtggattttttgcggttatggtggaaatgctaattgccaaggataaaatgttggatgataatttgagcaaactaatctttgaaaattatcaactactaatatcagagctttcaaaatacaatatcacaccctacaatttcgatggctcagtgaattggggaaattttggacttcttgttattgcggttttcctcaattctttgggctacctcgtcatactttattgtggagttcaaatgcatttgaacatgaaaaaggagctggcgaagctttcaatttctaatcaggaacttcaacgacagtttttcaaggctctaattgctcagagcattggtccaacgatatttttggtcttgccaatggggcctttcctattgagtcccctaattcctggattaaatgtcaattggcagtcaggatggatattttgtctagttggagcgtattcgccatttgatactatcatgtttatgatgattgtgtcagaatatagaagcttgctgaaaaatcgagttggttatacagtttctgcagctactccagattatcgaactcgggatccggcaactactggtgtacaaactaattaa

SEQ ID NO: 423 - DNA, 996 bp, Caenorhabditis elegans
atgttcatgttcaagttatttggctttttcacagcgtttggattcttttctggatgcatcgcgaactccctcttcatcttcatcacaattaaatatattaaaaacatatcagtaccatataaacgaatgatcgttgtcttcgctgccctgggactcatgttttcgggctttgaagctatttcaaaaccattcacccacaactacaatggtacgctattgtacttcagcgctaccaattttcaattaccaattaatatcagcaatgccttcataacggtgtggtcgtgcttttatctaacaactttctcatttatatccgtcctgttcatatacagatatttatgcttatttgacagttcaaaaaccaggttttttgaaggattcaaaggcggcttatggatgttgtatcctttactaccaggaatttgctatgctagcactataaagtatttatgtgcacctaatgattatacagatgaatatgtcagagactctgtagcagagaattatggattaaatgtatctgaactcgctaggttctcattaacaccttataattctgatggctctgttatacatactagtataatattccttttgatcgcatcatctctcatcaattttcatttctccatcatcatattctgcagtctaaaaatgcatttcaacatgaagaaggaattggaaaagttctctgtccagaaccaaaatttacaacggcaatacttcattgcacttgtcatacaggcgttagtaccaacaatgtttctgataacacctgccgtgccaatcttgatagctccatttttggcaccaatcgttggaattgaagtggattggcagtctgggaacctgtattcgcttgttggattttatccgccgtgtgattgtatttcagtcgcactagttgtttccgagtatagaaatattattaaaaataaaatatcaatgtgttgtaagaacaatgcacaagtctccgtgataaattcactttga

SEQ ID NO: 424 - DNA, 1032 bp, Caenorhabditis elegans
atgtggggaagaccatcttatctgcctcatgcacgtttctgcattttcatgggagagcttgggtttttctcgaacgcgtttttcggttttatcctcgtctacctgacattgtttcacatcaaacggcaattcggctcctacaagtacttgttagtcaactttcaacttgtggggttctgtttcgcatcctgtgaatacttgtttcacacgttcctccacctctacaatgccagtctcatctacttcagtctctcgcacccactcggtttttccaatttgacaatggaatggatgatggcagtttacacgggactgtattcctcgacaatatgtctcctggcaattcaatccatttaccgttactgggccttgtttgatactccaaagttggagtactttaatggaatctactatttcatttgggttggctattacacattcttcggaatcctctggtctctaacagtcggttacttcttcgcgatggatgagtttagcatggagtatctaagcaaagagatttcattgcggtatgaaagaaatattacggatactccaatcctcgatctgatagcctatcaaggcaatgatttccgctggaaaaacttaacaggcgcactgatgatgactgacatctcaacatttcagtacacgattatcattgtttgcggctataatatgtatcatgggatgcaaacaaaactctccctgctttctgcacaacaccgtcgtcttcatcggcaattcttcagagctctaacaattcaggtcgtctcccccacaataatcctcttctgcccagtgttcttcatgatctatgttccattcgctgatttggaaatgagcttcccgtcctgcatcattcaaagtggcttcacagtgtatccagccctcgattcagttatcatgatgtgctgtgtatcggaatactttcgaatcttcaaaaaactatttgtttcgatgaaacagcccaaatcatcccaagatgacagtgaaaagaaaagaattcaaatggtcaatccgaaaatttga

SEQ ID NO: 425 - DNA, 1023 bp, Caenorhabditis elegans
atgccttactttgaactggcatctaacgtctctaaaatcgcattctctgctggctttctctccaacactttcctaatttacctgacagttttccacgtcaaagctgtctttggtacttataaaaagatggtgataatattcgcgatactgggcattacattctccggcctggaaattctagcgaagccattcgcccacaacttcaataactgtgttatgtacttcagtgttaacacgtggattcagccgcaatcaatttcgcagttgctcatagcaatttgggcaggactctatttagttatagtctcatttatttccgtccaattcatttatcgccactgttgcttgtcaaatgtcagatgggcaaagaaatttgacggactcggatgtttcctctggatggggtacccattgatccccggcgcgatttatgccagctcattttattggttctgtttgcctgatgaatactcggatgattgtgtgagagaaacaattcttaaaaactatgctttggcaactgcggacgttgctagattcatggttgctccatacacatcagaaggctcctggcgactcaataactcatttttccttctctccggcgtggtatccatatggcttcactactccgtaattctttactgtggagtcaaaatgcacctgaacatgaaagaagaactcaaaaagttttcggttgtcaaccgaaaacttcagcgtcagtttttcaaggccctggtgtttcagagtattggaccaacagttttccttgtgctaccggttgcaccaaccatcattgctcctctggtagctccgtatttaagcctagaaatcaactggcaaactggatggctatactcgattgtcggaatgtacccaccatttgatagcgttgcattcatgctcattgttacagagtatcgaaaaataatcagagatcgatatctatttgtttgtaccaagcggtatttggcgggaaacattcaggtggtctcgacatcttctcaagtagttaataattag

SEQ ID NO: 426 - DNA, 1077 bp, Caenorhabditis elegans
atgactgtttcattcgaagaagtctccgacaattcctacctgatcgctgtgatcttctgtgtctcctgtaacattttgctcctttaccttgtctacactaaaagcccaaaacacgtgggaacttacaagtacctgatgaccttcttcgcgttgaatggaatcttgcactctgtctttgattttattacaaaaccgattttcctaatgttggatggaaatgaaaaacacggcagtattctggtgtattttgtgttgaataagagatttccgtccaaatggtgggcagtgctggcctctgaaatctatggcttcttcttggctgtgatttttgcggtccacttcattttccggtattggacaattaccaaaaatgacaaaatccgttttttcaactttccatacttcatctgctggataatcgggagctactattttggagtagaatactcctatattctccacgtagagttctcagagagacccgacaaaactgaatttatccgtcaaaaaatgtcggaagactttgggcacacaatggacgagatcacctatatggccgccagatttgtgaaatattccgaagaagcgggggcgttaactattgattggcgccaagttggattctattttgcagccacgaaaactatgattttgagctttattatattgatttattgcggaattgctatcactaaaactatacggaaggacctgaaaagtttaagatccaaggaacggctgaggcttgagcttaatctgtttttggcgcttattgtgcagacagtaatccccgttctcatgatctactgcccgttccttctcatgtggaatttccccgttttcctcggcatagaaaccgcccgtctcaccggaatgggcgtggccttgtatccgggaatcgacccgttggctattattttcatagtggccaactaccgaagagcacttcttaagcctttcagaaaagtttttttggttcaaccggcaagtagtaccgtcagagatatctcttcgacaagccgtgctttggcccaagttgccggaaatcaagtggctcctgccgtggttattaattga

SEQ ID NO: 427 - DNA, 1020 bp, Caenorhabditis elegans
atgtccaccccctcgtcttccagctatgtccaatggctcaacgtctctcgtatcactgactttatcacattcataatgtccactttaatcaatggagtacttctcaacctaataaaaaccagctcccctaaacattttgggaactatgtctatttgatgatggcattttcaatcaatagtctggtttttgcaacgatccatgcttttatacaaccgataatctctacggaaaaatacgtcttattcgttttcacatcgacaaattatttggaagttccacggatttttatgcgaggtcttttgtcaatctacggaacaagctacagtcaggcattggttttcatagctgttcaatttgtgtacagatgttttgcaataagtcgtcggaaatatttgcactatttcaaagggaaattcttgggattttggtttggattggttggaatatttggtgtgaattgggggctttgcatatttttaattgccagagagaccccccaggttgacgaggttttgagaccagtaatgacttcaagtttcaacctgaacatgacggaagtctactatgttgctgcaagttacgccgttgaaaacgaattgggaatacggtcactcaattggccaaccatttttatggttatcaattttgcactgatcatgggtctctcgttctccgtgattcttctatgcctatactttatccatcacaaaatgaaaggtgtcacctattcaaaagtctacgaagccgtccaaaaacaactctacagagctctgttatcccaaatgattgttcctttgattctcatctacatacccattctaatagtaatgattcttccaatttttaatgtaaaaaatgatgcttccactagtttaacctccattttaatttccatctacccagtgctagacccttttgctgtgataatgattatatcagtttatcggcaaggctttttcaatatgtttagaaataagccagtgaataatcaagtggccaatttggatatgagtttgtga

SEQ ID NO: 428 - DNA, 1077 bp, Caenorhabditis elegans
atgcccattctcgacggcccaacttggttgaaagttactaattggttcaatataatttgttttagtacttccattcccatcaacttcttcctgctgtactgcgtcgtgacccaatccggtaggaatattggcgattacaaaactttgctgatttggtttgctgttcattgcatggcttttccggctgtcaatttaattactaatatgaatttctacactcacgaggctactttgttcattctcaccgtcgcaaaccgtttcaattttccatgcttgggtgtctggatgttgcttgcaactaactggatatgctgcggctactctattctctcattgaatgctcaatttgcatttagatggattgttatgtcaaattccggaaaaaatcttttctggcgatttcgtaaagagatttttctcaatgtactacttggagtgactggtttttattcattttctggatttcttggtatccagctaacaccggcaaaggacttggcgattcaggagacattggcagatgcttacaacgtgactccggataacgtgtattatattgcagtgcaatattttgatcgagatgcacacaatgtgaaggtttatgacactatatcgttcaccgttgctattgggaacattctcatttttttcgggatggtggttttcattttcgtctgtggagtacggacattttttgctgcacaacggaacactgccgagttgctgaatcacaaacagctccagaaggatttgactatagcgcttttgattcaaactgttgtcccatctttgcttattttcctgccgtgtgcaattttctacctgcttccacttttcgagcaacctcttggcgttgatgcaaacattctgctaattgcaatggatattttctcgaacgttggccccataagtattctgttcacattcaagaactatcggctgtacattttaaagctctgccgtcgcaaaattgctcaaaaaattcgatgcagtgtcattgaaatgacaactgtcactgagaaccgtgtctatgcacagaactattctgattgggatattcggtttgatatgatttga

SEQ ID NO: 429 - DNA, 996 bp, Caenorhabditis elegans
atgggtaacgtgggattcttctccaatgcattcttcggcttcattctggtattcctgacattgtgtcacatcagtcgacaattcggatcatataagtacttgctcgtgaacttccaagtgcttggattcattttcgccacattcgagtatctttttcacacgttcctgcacacctacaatgcgagtttgatctactttagtttctcccgcccattgggtctttcaaatttcacaatggaatggatgatgggaatctacacaggactatactctgcaacaatttgccagctggcaattcaattcatttatcggtactgggcactttttgatactccgaagatcaaatatttccatggatggtactacttgatttgggtgtcctattactcattcttcggagtcctatgggcatttgcagttgggcatttctttgcgatggatgacttcggaagagaataccttggtggggagatacttcttcgttacgagaggaacatcacagatatccctgtgcttggcctgattgcctatgaaggtaatagcatccgctggaggaatgtctatgggctctctctaatgacattgatctccacaatacagtactccatcatattgatttgtgggcaaattatgtacgaaggaatgcgtattaaactatcccttctttctgctcagagtcgacgtcttcataagcaatttttcagggctctcgtgattcagatcactgcgccaacaatcattctgttctgtccagtcttcttcatgatctacgccccatttgcagacttggaaattagtttcccatcgtgtataatccagagtggcttcacagtgtatccagctattgattcgatcatcatgatgagctgtgtttctgagtatggaagggcgctgaaaaaagtgtataggaatgcgaagaaattttgtgctgtgaaaattccgaaagacgtcagcaaagatgttgttggagcaaacgtcattactacaaagctttga

SEQ ID NO: 430 - DNA, 1089 bp, Caenorhabditis elegans
atgcaactcaaccttaatctttcgcaatatctagaacttattggctcgtcgttatcattgcttttcaatttagtactgctcgttattatcattaaattttctagacccgaatatggttcttataaacttttaatgatggtcatggcaaccctttatgcaatttattcagctatagaagttattatcttaccgagctacctggttttcgagtataattatttattatataccactcagtttgtggaatatcagctattatctcaaattttgattgtcacgttttgctcaattttcgcttgcatgcaagtcgtattatctactcaatttatatatcgttacctttcagttgccagttttcatttcctccgggaacgctatttcaaaggaaaacgacatgttgtttggataagtttaacttcgatattcttcacaaattggttccttgttgcctggtttgtctacggaaatcacggggtttacccaaaagagttagaagaagagatgtttgaaaaatttgatagaaatatcagccagatggcattcaccttggtgtcgtatgcaaagcaaggagaaaatggaaaagtgttgccaaattatttgaacattgcaatgatagtttatttgctagcatgtgcgatgattccaatgaatatttcactttcttgtggtattaaaacatggcttaaaattcgtagcacaataaacatggctcaaaaatcacggcatttgcaaaaacaggaacgccagctgtttttcgctttacttatccagtttacaattccatttattggcaacactgtgccaatgttgatattattcttctgtccagcacttcatatttcaacagaaccctatacaaattatatttgcatgcccgtcccgttttacccaattttcgacgccctagcaacaacttttgtaattaaagactattacaggggaataatgagaattttcggattgtccagatacattaaagaaagttccacagcaaccggtatccgtgttcccgccaacacgttaggagagcaatcgagtgtatcaattaatttgaggcagatcaatacgattagagtcgacaactggtga

SEQ ID NO: 431 - DNA, 1017 bp, Caenorhabditis elegans
atgagctctgagtttcttcttggcttggctatgcatacatcgggaatcaaatatattatttccctggcatctgaaatcttccttcttctcttgataattttcaaaactcgagctagttttggtccatacaagtacctgatgattgtgtacaacgtggttctaataatgtattctacggcgacaactaatgcaaatttggcagctcacagtactgaaacatcttatgtactcttcagaatgtacaacggtccggatagaactctcggaccactcttgattcttcaattttgcacaatgtacgtcacaatgctcatcatcctatccgttcacttcatttaccgattcgtcgcaatctttcatcaccggtatctctggatgttcagcaagttgtaccttatgttttgggttctcggatcgttcactctcggactttttctcatttcactgaaatatttctttcttggtgaatttgattatttcactgatcagctaacagaggaatttaaaacgaattataatctgacaatggatcaagtactttacaacgggccaatatattacatttgcgatgacaacggagagtgcacaaagccaattggtgtctggttaacaatgatggctttatgttcatgctttttcatttgtcttggaatcatgggatacttcggaatgcaatgttacttcaaattggcaaaattacagtcggaattgagcgagcatacaagaagaatgcagaagcaattactatttgcattggctattcaagcaggaattccaatcataatgatgtacaccccaactgctcttctcttggtttctccaattgttggagtttcatttggagcatactctaacattgcaatagctttagttgcggtttatcctccacttgatcaactagcaataatttggatcattcgagattatagaaatgcaattagaagattcatttgctgtgagaaaactgatcggaataaggttcaatctctatattcaactggaagaaccacattatag

SEQ ID NO: 432 - DNA, 1023 bp, Caenorhabditis elegans
atgttggctataacttctcgttgtgagctagttggagtcggaatcgcatcattttccaattctttacttctttatatgcttactttcaaagccactagttcctatggttcttatcgtcgtttaatgttgtcctataccatcgttgaaatcatgtacacatttttcaacaaaatctgtggtatgatggcccatagtaccgaaacttcgtttgtcgtgttcaacgtttatcaaggatatgttagccgttcgcttgcacctatttttctcctgggcttttgtgcaatctactacactttgattactctcctcgttgtccacttcatataccgttatatagttatttgcgactcagcaaaattaaagtacttcgatggaggttatttgttgtgttgggtatttggatgtgcagcttgtggaatctcgatggtgactgtaaagtattttgcttttccacaaaaagagcggctaacaaatgaactgcgagatgacttttcccaatactataacctgactatggaagaagttgtttacaatggaccaaattattacaattgtgatgaaaatggaaaatgcgaaatatcgttagttgactggattacaatgattattttttgttgtggattaatgttctcagttataatcatgttctgctgtggatatttttgttgtatgaaacttgaaaaaaacaagctgaatgctagccaccacacagttcaactgcagaaacagctgatgattgctttgatcattcaatcgctcattccgataactctcatgtacataccaattcttattctctttgtaactccaatgattcgcattgccgccggtccttatgtcaacattgcgatagctactgtagccatatatcctccagttgatcaatttgcaatcatttatgttatcaaagactttagaactgcagtaaaaaatttcttcaaacgcggaaccaaatcgggcacctcaccgtcttccgctgttttaacaacaaaaaaaaaggcctggcatcatctccttaactga

SEQ ID NO: 433 - DNA, 993 bp, Caenorhabditis elegans
atgagtgcgaaatggatgttaactcttacgtctctttgcgaacaatcaggagtcggcgttgcaacgttatcaaactcgatgcttttgtacatgctcacgtataaagcaagtccatcttatggagattatcgacgtttgatgttttcctatactatcgttgagatggtatattctttcttaagcttcacttcaggcatgaaggcacacagtactgatacttcatttgtcgtcttcaacttctaccacggatatgttagccggtctattgccccgctctttctcattgatttttgcggaatttacttcaccttgattttaattcttgttttgcattttatttaccgctacttcgttgtttgcgatgctggtaagctggaaaatttcaaaggatggtacttaatgctctgggtggttggttcgacgatttctggtttttcaatggcttatttaaaatactggaccttcccagaacgtgaacatctaacaaatgaactccgcgaagattttctacaatactttgctttaacaatggaagaaatagtgtataacggaccaaactattatgtttgtaaaaagttcaatgactgcaagaagcctcgagcagattggattacgatgttcattctctgtggtggtctaattttttctgtctctacgatgtgcttctgcgggtacagttgttgtaaaaaacttggcgagcacaaaaatcgtttgagttctcgcaccgccaaccttcaaaaacaactaatggcagcattgattattcaatctgtcattcccataatcttcatgtacataccagtttttcttctcttcatgactccaatgttcagagtcggatttggtccttatgataatatcgctatggcgactcttgcaatctaccctccagttgatcaatttataattatctacgtaatcgaagatttcagaactgctgtcaaagatctgttcaaatgcggaaagatgcaagaaagtgcaccatcaaactga

SEQ ID NO: 434 - DNA, 1020 bp, Caenorhabditis elegans
atgagcgccagatgggtactggatcttacggctcgttccgaagagttcggtctcgtcaccgcagtattctccaactcaatacttctctacatgcttttctacaaagcaaatccgtcattcggcgcgtatcgccgtttgatgatctcctacgctgtcattgaaatggtatactcaattctaagcttcacgtcgggaatgatggcccacagtacagagacttcttgcatctcgttcaacttgtaccacggctacgttagtcgagatcttgcgccgatttttctggttgacttctgtggaatctacttcactttgatccttattctcgtcgttcatttcatctatcgctacgttgttgtctgcgatttccacaagctgagattcttcaacggaccatatcttatgttctgggtgattggcgcagcagtcagtggattctcattgggctacttgaaattgtgggcgtttcctgaacgagagcatctgacaaatgagcttcgtgaggaattctcgcagttctataacttatcaatggaagaagttgtgtacaatgggccaaacttctacaagtgcaatgagatcggcgaatgcgcgagaccctcagctgactggatcatgcagctcattctgactggtggtttggtcaactcagttatcatcatgtcctactgtggattctgctgttgtaagaagctccgggaaaatagaaaacacgcaagctgccggacagctgatctgcaaaaccaattgatgatagctttaatcgttcaggcagtcatcccgatagtcttcatgtacatccctatacttctctttttcacaacaccaattttccatatcgggttcgggccatatatcaacgttgcaatggcgacactggcgatctacccaccaatggatcagtttttcatcatctacataataaaagacttccgaaccgctttaaaagagatcttcaaatgcggaaaagctgtttctgacgcatcatcatcatcacaagcgttttcctcgcgactgacctaa

SEQ ID NO: 435 - DNA, 1065 bp, Caenorhabditis elegans
atggcgatttccgtgcagcaagtgagcacctacgcgggattctgcttatcaattctgataaatagtattctaatgtatatgataaggaagaaaacgacaaagcagttgggatcctatgtgtaccttatgctgagcttttccatttttgagctcgttttttctacggtagacgtcctgaatcaaccgatgatcttcgtaaatgaaggggaattcctattcttcagtacaaacccattgcatcttcacaagactgtggcaaaacatttcaacttgataaactttgcttgctccggaattatcatctcccttctggcgattcacttcttttatcgctatttggcagtttgcaacaatcaagcctggctgcaacactttgagatgccaaaattcttcatttggatctcaattttcgtgcttttcgggctggaatggtatctggcaactctgtttctaggagaagctaaggatactgtttgtgaagttgatatagacgcacttgttgagtactacaaggtagatcctttgactactgtatttgttggaataaaataccacgtgacaactgcaccgggcaccattttctgtggaaaatcgatattgttggctgttattttgcttaaaattgtggtaatttcctgctcaatcgtaacctattgcggaatccgtatctggcgtgagatctccatcaaaaaacgtgtggtctcccgtcggaccctcgacatgcaacgacaattcttccgtgctctggtggttcaaactctaattccaatttttctgctctacctcccacttgccacaatgctcttggctccgattctaatggcgaatctgcacaaaatcgatgtaatcattcaattctgcttcgttttctacccaatcttggaccccattgctgttttgataattgtcagagattatcgaagagctatccggaattttttggacgaacagatttggaagaggtttctgggcgttttgttgccatggcttttgcccaatagacccattgaagttccaccaatgatccatgttccacagccagttatgccacgtttcatctattaa

SEQ ID NO: 436 - DNA, 1056 bp, Caenorhabditis elegans
atgttcggcaccgtctacctcccttacatcaaattctgcattttcatgggggatttggggttcttttccaacgccttctttggcttcattctggtgtacttaacgttgttctacatcaaacggcagttcggatcctacaagtacttgctcgtcaactttcaattattgggcttcatcttcgcatcgtttgagttcttgtttcacacgttcctgcacacctacaacgccagcttgatctactttagtctttcccgcccattgggactatcaaacttctcaatggaatggatgatgggaatctacacaggactgtactctgcaacaatctgtcagctggcaattcaattcatttatcggtactgggcactttttgatactccgaagatcaaatatttccatggatggtactacttgatttgggtgtcctattactcattcttcggagtcctatgggcatttgcagttgggcatttctttgcgatggatgacttcggaagagaataccttggtggggagatacttcttcgttacgagaggaacatcacagatatccctgtgcttggcctgattgcctatgaaggtaatagcatccgctggaggaatgtctatgggctctctctaatgacattgatctccacaattcaatactcggttatattgatttgtgggcatcaaatgtatcatggaatgcgcgccaaactctccgtcctatccgcccaaaaccgtcgccttcataagcaattcttcagagccctcgtgatacagatcactgcgcccacaatcatactgttctgtccagtcttcttcatgatctatgctccatttgcagacttggaaatgagcttcccgtcttgtataattcagagcggcttcacagtatacccagctctcgattcaattatcatgatgagctgtgtttctgagtatggtagagcgttgaaaaagctaatctggaacactcggcaaaagtacacagtaaggtctccggggccggcggcggacgaaagtaaagagacggtcaagactgggagcaaggcgattactactaaactttga

SEQ ID NO: 437 - DNA, 1020 bp, Caenorhabditis elegans
atgttgctcgattttcaacaaacctatgcacatgttaccttcggtctttccatattttcaaattgtttattgctttctttattgctgtttcgaagtgaccgaaatcttggaagctacaaatatttgatgtttgcattctcatttttggggattttcttctcaatcgtcgactttttgaataagccgatggtgcacatttttggtggagcatacttggtattcagtctgaactctcttggccttcctcatttcctagcaaattggttcaacgcacttaactgttcatgttatggaatgacaatatcattattggctgttcattttatttatcgatacttggcagtttgtagaccaaatcaaatgagctggttcatgtggcctcatgcaattgtttggtttttgttttgctccgaaatttcctttgaatggtggattactgcggtgttatttgctggagaaactacaaaaattgatgaactgatcaaagactcaatggaaaccaattacaatttgacaaaaggagaatttatttatgcagcttctctttattataaaactgatgattccggggccaaagcaatttcatggcctgatatattgtttgcagtcaatgtggtcaagcttattagtatctgcatgatcattgttttattttgcggaatttcaacatttcgaaaacttcgaacacttcgtcattattcgaaacgaacgacaaatcttcaaaatcaacttttcaaagctctagtgactcaaaccattattccagtcgtcacaatgttcatacctgcagctgttatgatgttagctccgttgtttgaagtaactctaggatcttacgaagttctggttatgccagtaataacaacatatccgtgtgttgatccaatagttgtcatattctttgtaaaagattaccgacaagcaatatggcagacgattcgatgcaaaagatgtctctttagcagaagccgatactctcttcgtggaactgctgtgtcatttataaccgaggcgtcatga

SEQ ID NO: 438 - DNA, 1032 bp, Caenorhabditis elegans
atgctcaacgtcacattttcaattataaccagttacatcaacgccagtttggcatttatttcaaattccattttaatttgcctaattattacaaaaactcccagaaatatgtgcaactataggcacttgatgctcattttttcaattttcggcattatttttgcattcatcgatggtacaaatcagccaatgcttcatttttacaatggtgcatatgttatattcagtagaaatgtgcttggactccctaggcatgtatcattttggtatattgctttaaactgcacgtgctacagtatgatcatgctcctactggttttccactttttatatcgatatttggcagtttgcaagccaaacatgtcaaaattattttcctttccatatgtcactattctcattttaatatttgtatttgtcagtgcagagtggctggtacttggagtttacatggcaagcgaaaatgaaattattgatgaacatataagagatacaatgctcaccaacttcaacctatctcgtttggatttcacctacgcttcatctctattttatagaactgacccagacacaggaaaggactttgcaagttttccggattttttgttcctgataaatcattgcaccactattataatcggcttctccattatcatatattgttggctcaaactccgcaatgagcttctccactctgacgatcaaactcaaaatctatcacaaagaaccttggatatgcaacgccaactcttccgatctctagtcgcccaaacactattcccagtgttcctaatgttcatcccggccggaattctactatgtttcccgattttgagaattgatatgggaccaattgaaactattatcatacccctcatcactactcaaccatttatggatgccttagtgcctatgtattacattaagatttatcggagagcaattctgaagtttgtctgtggaaagagatatcattcaaggatccatggaacttctagtcattcatcgaagattttttcatttcggacataa

SEQ ID NO: 439 - DNA, 1062 bp, Caenorhabditis elegans
atgctcaaagtgacattctccatcatttcctgttacctcaacgcatttgtggcagttttctcgaattccattttaattttcctgattattactaaaacacctagaagtatgggcaactataggtttttgatgctcattttttcgatttttggaattatttttgcatttatcgatggtacaaaccaacctatgctccatttttacaatggtgcatatgtaattttcagtagaaatgtgctagggctccctagacaaatatctttttggtatatcgctttaaactgtgcctgctacggtatgattatgcttctgctagtttatcactttttataccgattcctggcagtttgccatccaacgcggctgaaaatattttcctatccctatttctcaattttagtgttaattttcatacttataagtgctggctggctcatcttagcaatacacgtggcgggtgaaaatccagttgtcgacgagcatatcagagatacaatgctgattaattttgacctaactagatttgattacacctatgcttcatcattgttttatagaaaaaaccctgtaacaaaggaggaatacgctagcatcccggattttttatttttgctcaacctcggcttgattattgggacaggcttctctattgtcatatactgttggttcaagctccggaaagagctgctcaattctgccggccaaatccaaaatctgtcacaaagaacattggatatgcaacgtcaactcttccgatctctagtcgcccaaacactattcccagtgttcctaatgttcatcccggctggaattctattatgtttcccgattttcaagacaaatatgggaccaattgaaataatcatcctgccccttatcactacacaaccatttatggatgccctagtgccaatgtactttattaagatttatcgaatggcgattttgaagtttttctgtagatcaaagtatgatactcgagtacatggtgtcttgagtcttgctatggacaattctgggactagaggaaattctacaaagaatgtttcattgaaaatatga

SEQ ID NO: 440 - DNA, 855 bp, Caenorhabditis elegans
atgcgaattccattttatactgtttctgcggaatacctaggttttttcgtagcatttattactaatgttacattaatctacttaatcataacaagaactcgacagaactttggttcatacaagtacttaatgctatggttcgctgcattttcactttggtactccataattgatattctaactcaaccagcaatgcattcatatctcaatagttttattgtattttgtgcaagttggtttaagtatgatcccctattggcttcaataattatcccaacttactgcacttcatacggactaacactggtcctgcttgccattcatttcgtctatcgatatattgcgatgatccatccaaacgaaattcgttggttcaaatatccacgtgcactgattgtcggatctcaaggcgaaattcaaattcaatggaaaagttgtttggcaatgaccaatgtatattgcattgcaataactactcttgttacaataatgtctctgggctattctatatatataaagatgcagtcagttaacgacatggtagcagaaaagacacgagcacttcaaaggcaactgttccatgcacttgtacttcagacaattgttccaatcatctttatgtacactccaacaacgatcctattcttatgccctataattggtgttgagctaggaatgattgcaaacatgacttcagtttgtttggctctataccctgctttagatcctttagttgttatgtacttcattaaagactaccgcagttatttgctcaaaaaaatgaatatttcgaaaaaagtatcaacagtgaccggagcaacttccgtcttcaggaacgaggatgagatcatttga

SEQ ID NO: 441 - DNA, 1092 bp, Caenorhabditis elegans
atgtgctcaaatcggtggctcaacgtaacctactacgtggaatgcatttgcttcggagttgccgtattcctgaacacaattctgctcattttgatccgagaaaagccacggctagcattcggcaagtacaaatatctgatgatggtgttttcgatccttgaaattctctatgccatcatgtacttttggtgtaaaccgaatgcacatgtaacccagacatcattcacaatattcactattctcgagaattcgcacgtttctaaggatattggagttatcgcagtcactatatggtgttccttctacgctatgatgctctccctgctctccatccacttcttctatcgttacacatccgtcaccgcacccatccttcttatgaaacgattctcatgtcgttacatattcaaatacactctatacatcttaacattttcttccatctggggtctctcgtgctatttcctttgcgggccgactgaaaacaaggattacgagttgaagctagagttcgaggaagcttactgcttggagcctgatgagtattcgtatgttggaccacaatatttctacgaacaccgcaaaattatcgattcgaatgaagaaatcagggagaagatcttccatcttccatctttccttggaatcgggatcattgccgttttaatggttggaattttggtttcttctgctttatttggagccgaaacttacaaaattctcaatgctcaaggactcgcatgctatgcagctaaggaactacagaagcagcttttcaaaactttggtaattcaaagctcgatcccgatgatctttatggttctaccgataacatgtatgttcttgcttccattttttggtgtcaaagttggagaagttgcaaatttaatcccgatgtgtgcggcgatatacccatgtttgaatccaatgatcgccatgattttcatcaaagatttcagtaatagaataattgaaatcatcacctgctctaaaggacgacgcttcaaggttggcacgttgccagccagctccgccgataacacgaatacattcaacatgcagaacttgtctcgactatctcttacttcctag

SEQ ID NO: 442 - DNA, 1014 bp, Caenorhabditis elegans
atgtgctcaacactatcgctgaaaatcacttaccatgctgaaattgcgggcttctcattgtcggtatttttcaattcggttcttctgattttgataagtgatatgccgcggaaaacctttggtagctataaatatttgatgatttgcttctcgatttgtggcatttatttctcttgttgcgatttttggtgtaaaccgtacgttcatatgtccaaaaattcatttgcgatttttaatgtattagaggaaacgaagctgacgcaaaacacgggggtaatcgcattagaattatattgttcctgctatgcgataattatttctttgattacaattcatttttactatcgttacctatccgtaatgtttcctgtaaaactcgttagattctctgttagaaatctaccattttggatattacttgttattttaaacgcatccgtgtggtttttactgaacagtttagtaaatgggccttctgaaattcaagatgcaattttaatacccgaaattcgacagagagcttgtctggagcgccatgagtacacctacgttggaaatgtgtttttgtatcaggattttgaaacaaataccaggaaaatcaacattattgctttcctttcttttggaataattggatcagttatgactttttctctggccactttgggatattttggtgcgaaaacatatttccatctcaaaaaaatctcatcattagcagtgagctaccaggaaattcaaagacagctcttccaaacacttgttattcaaaccatcataccaattacatttttgtacacaccagtaacccttatgtatttatttcctgtttttggaattcaatttgtggaaattggatatatcgctccaccattagtggcactatatccatgcctggagccattagttgcaatgtactgcataaaaagcttcaggttcagaatacttggttggttgacatgtcacaaatacaaaaggaatgtagtgcatgtgtcatttgttcaaaccaattga

SEQ ID NO: 443 - DNA, 963 bp, Caenorhabditis elegans
atgaaatggacaattcaattggcatattacattgaaacaatcggctttgtgacttcaacttttttaaactcgattctcttattcctaatcagtaaaatgtcaaaacaaacgttcggaaactataactatcttatgttttcattttcatcattttcaatagtatattcatttgtaaacttttggagcaaaccgaatgttcttattaccgacaaatcttttgcgatttttgttgatttgaaggagactggattcaccaaacaattcggagcaattgcgattggactgtattgttcttgctacaacatcatgctccagttgatcacaattcatttttactatcgatacctttccgtgacaagcccaactgatctttcgaggttctcggtcaaatctactccaatttggatacttttcataatttccatttctttcctctggttcagcatgtgctattttaaaaattactgtatggaaccggaagaatacaactacctgggacctcaatattactatcaggacgtaacagggcaaacacgatttcatattccttcattgttggcgtcgggtacgatgggagctctcatgtgctgctccatcagtgcaatcacatactttggatttcatacctacaaacatcttgcaaatcttggaactattggtagttctgagactggagatcttcagaaacaactctttagaacgctggtcattcaaactttaattccgagcgtctttatgtatattccagtgtcatgtatgtttttatttcccttatttggcttgaaagccgaaggaattgataccttggttccaatttctgtggccatttatccgtgctttgaaccactagtcgcaatgtattgcattcgaattttcagaaatcggatatttgaagttctttcctgcaagaaagtcaagaagttgatgaagatctcggtggttccaatatcaaatcagaattaa

SEQ ID NO: 444 - DNA, 1035 bp, Caenorhabditis elegans
atgaatgtgtcgtgtgctattccaacgtcaccctttcttaaatatttgggtcatatttttgtatgtttgacggctccgatatatattgcaacatgttttattttgatctggaaatgtccttcatttttcaatcagtatagaaccctccttttgaggcatattttcacttgtatattcatggaatattttatggatgcaatttggcagcttatagtagttgtcccatggtcagcattatgttcaatgggaataggttatcagttacctgttttaatgttttcaatcgtggtagctggtttgtgtgcaactggaatatctataatacatatgtttgaatatcgaatgaatgcagttaccgatgattcaattaaagttttgagacgagttataactggtgtaaaatactatcattatttcatgatgacgtcatgcatgtgtctacttgctgcgtcatataatcatttagctgatcaaaaagcttttaaaactaaaattgaaaataaatacggagaacttccatcatatatttggtgtgataattgtatgtttatcaatacagactccactctagttttgatatttgttggtgtagcagcttctagtcaaccacttgctgctgtctattttgggttatcagtttatgcctcaaaacttggacttcaaaaacttaaggcgtcgctttctcagagaacaatatctcttcaacggaactttttgcatagtttgtatatacaaactgctgttcatgtgattttcatttccatacctcttggaatcttcttcttatcttttatcatttggattccatcaagtgcaatgtatatgagttatatcctcactgcaatgtgcactcaacatggatccttatcaacgttagcactgatgatatccaataagccgctttattctgttttcactaaaacattttggcgcataaaatcaagcataactggatcggatcgtgtgacagcagtagaagcatctagctggtatagatcagcaattgctgtcgcgaacgcggagaaccaagaataa

SEQ ID NO: 445 - DNA, 1071 bp, Caenorhabditis elegans
atggaccttatctatgataacagagagatatgtaaaaaaccagcaccaatctgttacagtatgggtttggctatggcacatttaattgctcttccgatttatattatggcattttacacattatacgctgaaaaatctcaaaacttcaaaatttataagcgatacttggcaactcatgttattagcaactttttgtttgaatttcatctttctgttgtaatgaagccagttctctacctaccgtacccagtaattcgattttctggtgcattttttctaacttatatcaatggttttatttcattttgtattatgtatctttttatcgcctcaactggatggtccattcttgagcttttatattttcgattcaaattaatttcaagtaatacagtaacttcaatttggattgcaaaaagttcagttttcgttaaaaatgtacgacgaattctgatagttttctcttcttgcacgttttgtttcctgttgcttggtattacaggaatgtttgatcaaactgctcataaagagaaattagagatcatcaacgaatttcccgaattaacctgtacgtcggctgtaacacttccgaaatcttcaacagatattaaacctattcacttatttaatgcctctgtttttgtgtcaataattgttggaagtattctttgtgcaacaatgggatcggtatcgttattggctcttcgagaaatggttagagaatgcagttcatcgttgaggacaatttcgatgcacagaggatttctgattagtttattctgtcaaattggagtacatggagttatgttaggattcccattgtttgtttatatgacttcaatagtttttcattttgatggaaatgatgttggctacgtggcaatcgtgctagcttctcttcatggagcaatgagcacactggcgatgattgtgttcacccgaccgttgctcaatttcgctagatcaaagcttcactcaattttctttccacgaaatatgtcgattcgtgacgtgtctttcctctcaagcagtcaatcgaggcaccagagtagtgctgtaaatggaggctag

SEQ ID NO: 446 - DNA, 1056 bp, Caenorhabditis elegans
atgtcgaaaacacaattagatgaatattataacacaacctatttaaaatgcaacttatctgataatttcgtggcatcttggaaaggagttgcatatccgaaccatatatttcagtttattgagctaccgtttcaaattctcgctttttacgtcattatagcaaaaactccgaaatctatgaaaaatataaagtttccattattaattaatcacctgtcatgtgcattggttgatctttcgttttgctctctatcaaccttatatttattcgttccgattcatggtgcttttggtgtcgggctgcttagttggttgggaatcggattccaataccagatgttcatgttggaaatttttggaatttgcgcaatatgttcctatacatatttatttgaaagccgaagcagtagcctacctcaaaatcgatttagaatatctcggagaaaaatcaaatttttatattattttttcgtattcctaccttttatcttaattgttattttcctattgaacatcccacaagatcaggacgcggcaaaacttgatgcattaaaaaagtatccctgccctacagttgagtttttcaattctccagtagttattgcaatatccgatgaagacgttgttaatattaaaaatagatttataatcccttttattggagcacatattgtttttaataactcattccacattttttgtttgatttattatctctatatatctccaccaaaaacactttctgttgaaacaaaacaaagtcaaaaacggtttttgattggaatgatggttcaatgttcaattccgtctcttcttggcttcattccgattgtaatagtttttatcgcatatcgtacgggtaatcattctcaggagctagtcaactttatggtcgattgcgttgggcttcacggtctcggagagagcttgactattctgttagtgcacaagtcttatcggaaagctgtttttcaaattgtttgtgtctggaagccaaaaaaaactacaacttcctttcaaatttctcagtggaattctcatttggtgctgaaataa

SEQ ID NO: 447 - DNA, 1011 bp, Caenorhabditis elegans
atgcccacagcgttagagcagtattacgcaacgaattactcaaaatgtaatctaccctataacattcttgccacgtggcaagcagttgcctatccaatacacattattcaattttgttcattacctgttcaagtcctggctttctacattattatcacaaagaccccgccaagaatgaaaccaatgcaattgccactttttctgaatcacctattctgtgcattgtttgacatctgtatgtgcacactttctacgttatactttttccaaccaataatggcgtttgcaagcgttggtgtgctcaactggttgggtgtaccatttgtttatcaggcagttcttggaggagcaatgcttgcaggtgttgccggctcatacgtcttcttattcgaaagccgtagcagttctctacccgaaaatcgatttcgcatatatcgcaaaacatcccgttttgcttatttcacatattttctcactccgttcatagcggcatacgttggcatggtcatgattgccgaggaatcagacgctggaaaattacgggctctagctatttacccttgccctacacgagagtttttcatatttcctgtttgtgtattcgagggcacgacgagccacatttttctagtttatgccttggttatgtcacatacatctggaaacattatatttcatgtcgcatgccttgtatattacttgtatgttgcgcctccacgcactctgtcacaaactactcgaagagatcagaagatatttttggtctgcgtgacggcacagacttcggtgccacttttggttataatcgctccggccatgaccgttttgttggcatcgtgggcgggatattatcggcaagaatggatgagtttggctgcaatttgtgttgcaactcacgcgcttgccgagagcattgcaattatgatggtgcacaaaccctatcgagcagcgattaggaaaatgctccgaaaagaaaatgcaatcgtcatccacagaagtgtagagttataa

SEQ ID NO: 448 - DNA, 1071 bp, Caenorhabditis elegans
atgacgtccgctctagagaaatactacgctacgaactataccaagtgcaatctcgagtataacttcttagcctcatggaaaggagttgcctatccttcacatgctattcaagtcatatcacttccatttcaaattttagcgttttatgttataattttcaaaactccagttgctatgaagaatgtcagaactccgttattggtaaaccattttttctgtgcatttcttgacttaaccctttgcacactttccacagtgtatttttttcttccaatgtacggaacatttttcgtcggggttctcagctggtttggagtaccaaatacttttcaaatactccttgtatggttaatggtgttgttaacagtcggatcgtatctttattttttcgaaggtcgctccagtatcctagttcagaacaaattccgaataactcgtcaaaagacaagggtgatatattactttctatttttaattccatggatgtcatcaatactttatgtagtaaagtttatacccgaagatcaagatgctgcaaagcaatttgctttaacattacacccatgtccaacaagagagtttttcacatttgatgtaatgatattccttgctgatagcattctgatcgaaggttttatttggatattcccaatttttggtatctatagcgcaagttttatactgtttcaagttacaactctaatctactacatttgcattgcaccttcaataacaatttctaaggatactcatcacagacaaaaagtgtttcttttctctattttactccaatgtttcattcctctgactcttgttttgtgtccagtatttttggtattcagtgctcacttggccggtctctattatcaaacaatggtgaatcttacagtttgtagtgctggacttcatggtcttgccgaaagtatcgcaattgtaactgtgcatagaccgtataggaaagccgttagtcaaatggctacagaatttaaaaggaggagacgggcggttcaagtgttaccgtttctggcaaaccacatgagacacagtgtcaccatgagacaatcattctga

SEQ ID NO: 449 - DNA, 1059 bp, Caenorhabditis elegans
atgacgtccgctctagagaaatactacgctacgaactattcccagtgcaatctcgagtacaattttctagcgtcatggaaaggagttgcttatccttcacacattattcaattaatatcacttccatttcaaattctagccttttacgttattatatttaaaactccaatttccatgaaaaatgtcaaaacctcattattgattaatcacttattttgcgcacttcttgacttatttctttgcacagtttgcacagtttacttttttttgccaatgtacggaatgttttttgttggagtactcagttggtttgaggttccaaatggtgttcagttactgattgtttggttatcaatgacatttgcagcagcttcgtatgtatatgttttcgaaagtcgcaacagtacactggttcagaataaatttcgaatgacccaacgaagaacaagagtaatattctactctctatttttaataccatgcttattggcagtttttgtgggaaaggttataccagaagatcaggatgctgcaaagttatttgcattaatagaatatccatgtccaacaagagagtttttcacatctgaagtattgattctctttgctgacaagactataatagaaggcgttgttcgatttttcccatttggttgtgcctacatctcaagcttcttcctttttcaagttgcaactctgatctactacatttgtattgcaccttcaaacacgacttcaagagatacccagcaaaaacagaaagtgtttctcatttgcattttacttcaaacttctattcctctgtttcttgggatgtgtccaatcatgttgactttcatggccttcttaaccggtcactattatcaggaaatggcgaatcttactttttgtagtcttggacttcacggtatggcagagagcattgctattgtcactgtgcatcgaccttaccggaaagccattaatcagatgattacagatttaaaaaaaaggaaaagttcgattagagtgtcaccaattagtgtgcatggaacaagcaacagtgtcaccagaggataa

SEQ ID NO: 450 - DNA, 1059 bp, Caenorhabditis elegans
atgcgatcagctatagaggagtattatgcaacaaattattcgaactgtaatttaacatacaatttacttgcttcttggcaatccatcagctattcatctcgtgttattcaacttgtcgcattgccatttcaaattctcgctttctacgttattctttacaaaacccctattgctatgaagatctctaaaactccattgttaatcaatcactcttcgtgtgttatatttgattttgtgttatgcactctttgtacactatatgtatttttcccgatgtatgcgttttcctttattggagtacttgcctggattggagtacctacattattgcaaattattattatttttgtggcaatgctctgtgccactttatcatacatttatctttttgaaagccgtgccagttcactactaaacaatagattccgaataaccaataatagatcaagaatcgtttacaactgcgtaatattgttcccactgatactcgtactaccgtttctcttttttgttcgtctggaccaagacactgcgaagctagacgcgctgaagaattattgcccaactcgcgagtttttcaccacttcggtgttcatcgttctcactgataagactctgatgagttatattttaattccacttatactgtttgtgttaagcgtagtcggacattatctattccagatgggttgccttgtgtattatatttatattgttccatcgagaagcgtctccagagaaacacgagaaatgcagaaaacatttttgatcagcattttgttgcaaacttcagtgcctttttttgtggtcattccagcagtgacagtgttctttttgtattcatatggctattattcccaaaaattcatgaactcggtcatttgctgcattcaaaatcatggtattgttgaaagtattagtgtcatatgtgttcataaaccatatcgaaacgatattgcaataaaaataaaaagcttaaagtgtcaaacaacaagaaatgtgatccctgtcgaacgaccagaaggaaatctgacaaagagacagtggcaatggcgatga

SEQ ID NO: 451 - DNA, 831 bp, Caenorhabditis elegans
atgaacccagcattagagtattattatgtgacgaattattcgaattgtgaatttcgttataacttttttgactctcatcaaagtattgtgtattcctcttatgctattcagttagtttcgataccttttcaaatgcttgctttctacgttatcattttccaaaccccagttgctatgaaaatctccaaaacgccattactcattaaccatacgttttgtgccatacttgatgtcgttttatgtaccctctgcccattatacttatttctgccaatgactgcagtttcttgcattggattgctcagctggtttggattacctacgttattgcagttgtctatcatctgtttggcagaaatattgttcatcgccttgattgatcaagttgcaattcgatatgctatcattccattagcattggcagtgagcagcgtactgggtcattttctatttcatatggtttgcctggtgtattatatttatgtagtgccatctaaattcgtttccaaggagacacagggaaaacagaaaacttttctaatcagcattttgtttcaaacctccatcccctttgccgtagtgatcataccacttgctattgttttcgccttcaattcattcggctactattctcagaaagcaatgaacttggctttttgctgcgcactacttcatggtctgtgcgaaagtgttggcgtgattgttgtgcacaaaccatatcgagacgtgattggtttaaagatcggaagattgttgttcaaaaggtcagaaatttccattcacgttcagccatcactcactcgagccagtggaaacctaactaatttttga

SEQ ID NO: 452 - DNA, 1014 bp, Caenorhabditis elegans
atgtgcgaatttaatgatcttggactggcatctcagcagggatttgcgatggttcttcacttgatgactgttattcaggtgcccgtacaccttttcggtggatatgtgattttgttcaagacaccgcagaaaatgaagtcggtgaagatgagcatgtttttgctccatttttggagctccctcctcgacatcaccatttgtttccttattgtcccatatgtaatatttccgattcccggaggtattcctctcggattcctctcatttttgggtgtcccacctggatatcaggcatctattctgataatctgcgcctcgtacaccgcgatttctataatcaatttctacaaaaatcgacatcattctatgaaacatggcccaaattctcagaatttgaaaactcgcctttgtcgatatgtatacatcgctgcgaactgcgtggcggccgtggcgtttttggttccaatttatattttacatccggggcagcgagatattcaaaaatatacaatagagaccatcccatgcctcccgccaaaaatctacgaaaacccaaatttcttcgtcgcctccacaagcatctcgtttatacttctagatatgggcctgctctccatattcgtctttgctcaaatcatatttctcatcgtctattccgtaaaggaactgcaaaaacgtcttaaaaacctgtcaaaagtgacgtcaactctgcaaaaacggttctcgaatgctctctacgcgcaagtgtcgattccgatgatcgcctacgcatttccgacggtttacgtgtttttttcgtggattttcgggagcttcagtcaggcttgcaacaattttgtgtttataagcctggcatttcacggacttttatcgacatttaccacgttggcggtgcataaaccgtacagggagtcgctgaaggtctttctgccgacttgtatgacgtggagggcaaaaagtcgcgtttctagtgtccgggaagttcagttgtctgcaattgtagcaattgtatga

SEQ ID NO: 453 - DNA, 1005 bp, Caenorhabditis elegans
atgtgcgagttcggcgattccgggtttgcgtcacagcaaacatacgtcgcaactcttcacataatggctgttttgcaagttccgattcatttatttggaggatatgttatcttgtttcggacccccgccaaattggcagctgtcaagtggagcatgttttttctacatttttggagttccctgctcgacataacggtttgtttcctggtaataccgtatacaatatttccggttcctggaggaatacctctaggtgtcctctcaataatgagtgttccttcttttattcaggctttcagccttgtagtttgcggtgcatttaccggtatttctatattgggcttcttcaagaatcggtgtcaatctatgaaattcggaccgttctctcaaagtttaaaaactaggctgggaagatatgttcacataggtatgaattatacaatgactttttgctttatgatcccgatatacatcaaactcccgggtagacaggagagtgagaattataccattttgactcttccctgcattcctgaaaatatctataaaaacgaaaagtttttcttaacatctaccagtgttccatttatctattcaatggttggtggtttaactgtattgataactttccaaattttattctacgtgatatattctgtaatcgaactccgaaagcgtatcaagaaactctcccgagttacatcatgtctacagcggaaattctcaaatgctctctacgcacaagtctcgattccaatgatcgtttacctttttcccatgttctatgtgtttttcacatggacatttgatgttttcagccagatttgcaacaatctcgtgtttattttcattgcgcttcacgggcttttgtcaacaattaccatgttcattgtgcacaaaccgtatcgagaatgcttgaaactgatcattccaagatgtccgaagtggcgaaagagatccagagttgcgagtgttcgcgatttgcatctgtcagtgattatttga

SEQ ID NO: 454 - DNA, 1011 bp, Caenorhabditis elegans
atgtgtctttggagaaactcttcttatgaatttgaatcctttgcaccatcaattttacatcgtcttgcggtattcgaattgccgattcatctactctctgcttatgtggttttgtataaaaccccttctagaatgggctcggtcaaatggatgatgtttacgatgcatatatgcggagcctaccttgacctattcctaagtgctctttctactcagtttttccttctcccggcggctgctggacattctcaaggagtctatactcacctaggaatgcccgtaagatggcaagcctatatgttcatttctgcaatttgtcttgctggtgtttcgattcttggattttttgaaaaccgttacgctgcacttgtaaaaggacgcggcgctagtttaattcaggaaaaacaacgtttggcatatattggtggacattatatttatgcattcatttttattctgccaatcacgtttacaccgcctgatcagacatatggaaagcaatatgtaaaacagatgcttccgtgtctgcctcaagaaatatttgatcatccggatttttacgtgtacgccatagaaatcactctactcactttcattatcggctctgcggcatttgtgataactggtgaagttatattttattttacgagaattgttgtatatttgtccagcacaaaagctaaatcacagaaaacgtataagcttcaattgcacttttttatttgtttaactattcaaattacaattccacttttaatagtaattgttccgattgtttatattgtttttgcatttgcaaatagtcattttgatcaaattctcaacaacatttcgctcaacataatggcttttcatggactcatttcaagtgcagttatgcttaccattcataaaccttatcgtaaagctgttttgaaaatgcttggtttcacctatataaaaacgaaagtcaatagaagcgcagtacacatggatggaacatttgttgttgtgagtaacaataggttttaa

SEQ ID NO: 455 - DNA, 1050 bp, Caenorhabditis elegans
atgtgcatctggagaaattcctcttacgaacttgacacatttgccccatatctgctacatagatttgcgatcgttgaaattccacttcacgttctagcgtcatatatcgttatatttaaaactccgtcgagaatggcgtccgttaaatggatgatggttttcctacatttttgcagcgcctttctggacctcttcatcgccattttctccacacaatattacctcgtacctatcgtcggtggatatacgcgtggagtattgtcagatattggtatttccactgacatacaaggtcatttattcattactaccatgtgtatagttggcatgtcaattctcggattctttgagagccgctataacactgtcgttaaaggaaaccgggaaaacattttaaaagcgaaaggacgattgttttatttgggaatgcattatctctatgcattgatgttcacgcttcccttgtgctataaccagccagatcaaatggaagggagaaaatttgtgaaaaggacccttccctgtgtacccgaatcaataattgatgaccccgactttcacatttggcttgaggaaccaatgatctatgcaatacattacgctatcaccgcatcagttattacgttggaagtcatctactatttcgtgcatactgccttatttctctcgagtaccaaagcaaaatcacagaaaacgcacaaaatgcaagtgcaatttttcatcgcgttgacgattcaaatagcggttccactgtttattgtgatctttccactttcgtatcttattacggcattcataacattgcatttcgatcagatgtacaacaatcttgctctgaatttcatcgcactccacggcctggcctccagttcagtgatgctaatagttcataaaccataccgagacgcagttgcagacttgctccgtctccgtgttatttgggcaaagtgtcatagaagatcagaaaattcggttggcgacgcatcattaatggtggtctcgagtattgtgaatattcaacgggagaggaaggcatcgaataggatttga

SEQ ID NO: 456 - DNA, 1050 bp, Caenorhabditis elegans
atgtgcctgtggagaaattccacgtatgagcttgacacatttgctccgtcagttcttcatccaattgcaatgatagaaattccaattcacttgttagcttcttatatagttatattcaaaactccaccgacaatggccaaagttaaatggatgatgatggttatgcatttttgcggagcatttcttgatctgcttctcagtgtcctatccacccaatactacctcgtaccagtagtcggtggctacatgcgtggaatattcacagatcttggtgtatcctcaattatccaaggccatgtattcacggtttcactctgtgtcgccggagtgtctatactcggattctttgaaagtcgttatcacgctgttgttaaaagaaatcgagagtcaattttcaaaagtaagaggagattgttttatgtaatgtttcattatgtatatggattcactttcacacttcccttacttatacacccaccggatcagatagaagcaaggaaaatggctaaagaggcgcttccatgtgttcctcactccatcattgatcacactgaattctatgtctttgtggaagaaccctacatattcgctatttactatggaattactgcagctgtccttacttcacaagccgtttactattttgcacgtactgcattatacctatcaagtaacaaagccaaatctcaaaggactcataagcttcaagtacaattttttattgcattaacatttcaaattgcaatcccattgtgtgttgtaatattgccagttgcttacatcatcactgcatttataacgaaacattttgatcagatcgccaacaacattgccttaaatttcattgcaatccacgggctggtatccagtacagtaatgcttattgcacataaaccatatcgagaagctgttggaaatatattccggctccgttgcacatgggaacggtgtcatagaagaccactaaattccatcagcgatcaatcattgatggttgtgtcgagtgttgttgttatccgacgggttagcaggatttctagcaggatatga

SEQ ID NO: 457 - DNA, 1041 bp, Caenorhabditis elegans
atgtgtctgtggaggaattcaacatatgagcttgacacatttgctccgtcagttcttcatccaattgcaatgatagaaattccaattcacttgttagcttcttatatagtcatattcaaaactccgcccacaatgacttctgttaaatggatgatggtgtttatgcatttttgcagtgcctttctggaccttttcctcagcgccctatccacccaatactacctcgtaccggtattcggtggctacatgcgtggaatactcacagatcttggtgtatcctccattatccaaggacatatgttcatagtttccatatgtgtagccggtgtatctatactcggattcttcgaaagtcgctacaatgctatcgttaaaagaaaccgagggtcaattttcaagactaaaggtagattgttgtatattgtattacattatacctatgcattttgtttcacacttccattacttttttacccgctcgatcaggaagaaggacggcgatttgtgaaagaggcacttccttgtgtacctcactctataatagaccaccccgatttttatctctttatcgataaaccatatatacttgcaatatactatggaatgacggcaacagtcttcgaaatagaagcgatctactacttcacacgtactgcattatacctttcgagtaacaaagccaaatcgcagaggacttataaacttcaagtacaattctttattgcattaacatttcaaattatgattccactgtgtgtattgatattgccaattgtatatcttatcactgcatttataacaaaacattttgatcagatagccaacaacattgccttaaactttcttgcactccacgggttgacctccagtacagttatgctcatagttcataaaccatatcgagaagccgttataaatatattccgtctccgttacatctgtaatcgaaaaccagcgatttctgtcagcgaacaatcgataatggctgtatcaagtgttgtagttattcaacgggtcagcagggtgtcacataggatttaa

SEQ ID NO: 458 - DNA, 981 bp, Caenorhabditis elegans
atgtgcacgtggcgagaaaactaccttgaatcttctgatttttatgtattatcttcacatattttatcatttatccaaatgtctatcaacattcttggattttatataataatcttcaaaactcccaaaactttgcaaccagtcaaattctccattttggtgatgcacattacgtgtttctggctggattttaatctcagcactttgagcatcccgtatttaatctactcggcagcggccggccaatcatttgggattctcgcatatttaaagattccaatgagttttcagttttatatgggcgctactgcagtatttcttctgggaccagccatactcctattcttcgaagaacgctacgatagactactccgccgagatgccaacactcgcagtcgcttcaaaaaacgagtcgcatattttctggtcaactaccctggcgcctttaccataaagataccagtggttatcgacgtctccaactctgaacaatctcggcataacatcgcgaaaaagtttccctgtataccatccaggattatcaccgatcctgggttttatgtggtaactgaggatctattgaaagcagttttgttgcacttgggaattttgacatttacaaccgttcaagtattgtattttttctatcatactgtgaaatacctgttcaaatcaaaaataatatctgaaagtacaaagcggctacagaaacaattattcaaggcgttgtgcattcaagttaccattccaacaattgcaatttttatcccatgcgtttacctaaacacttctgctgcactggatcatttggatatgattgaaaataatacagcaataatatttctttccctgcacggttcaatgtctacaattacaacacttttggttcataagtcgtatagaaaggctgtaattaaactgattcttcaaactaaaattgtatccaagccggtgaccattaatagagttagcattgtgtaa

SEQ ID NO: 459 - DNA, 990 bp, Caenorhabditis elegans
atgagttgtacatatcgaaatagttttttggagtctgaacaattctatgcaatatctttgcacattctatctgtaatccaagtgccacttcatattttcgggacatttattattgcaactaaaactcctgcttatatgaaaagagtgaaaattacaatgttggtggtgcatctaacatttgcctggcttgacatctacatgacaattttaagtatgcctatttttcttattccaatggtgtcgggatatccactgggcttgttgtattatctaggtgttccagtacgatttatgacctatttgggatatttgtcagtatttcttacaattcccgcaatgataatgttcttcgaaaatcgttacaactacttggtccgcaaagatcacatgacaagagggaggaaaataaaaagattattatatttttcactgttgtatattttatcagttatcactttcatcccaccagtaattgataatcctaacagagtagaagtcctggaagcttctcatcggaagttcccatgcctaccaccagagataattgataatccaagactattcgtgatgggaactgataacaacacgtttatcgcttgtgtggtcccttatattataattggatgggttcaaatacttggattctttgttggaactgttaactttatttatagaactaaaactatgtctctacacacttcaaatctccaaaagaaattcttcaaatccctctgcattcaaattgccgttccacttgtagtcctccttatcccagagtcttatattttgaatacggctatttctggaaatatggatgtaggattgaccaatattctaatgatttggatggctagtcacggattgttctcaactgttgtcatgctcattgtgcacaaaccgtatcgaaaagcaactctaagtattttaggtcgaccgcaggcaatcaaaacagctccagtttcgataatttcgaaattgttcacacgttaa

SEQ ID NO: 460 - DNA, 1002 bp, Caenorhabditis elegans
atgtgctctacaagtcttaacttccttgcttccgacgaagtttattcaaaacttctacacactcttactatgattgaagttgttactcatacatttggagcatacattataatttcaaaaactccaaaaaagtttgaatccgtgaagactggcatgctgattctacattttgttggagcaattgtcgatgtttatttcagtcttttaactatgccagtcattctggtacctgtttgtgctggctatccgctaggtattcttaaacttttcgggcttcctagttcggcgcaagtttacatgggtgtttgttcacttgaagttatgatttcaacaattgttatattcctcgaagaccgacgatatcgtttgattaatggtcaaaaagatagcacactgagaaaatggtatcgtttattatttgcaacattacactatgctctggctttaacatttcccgttcccgtatatttgtctcttccgaaccaagaggatggaaaacttgtgtcacaaaatagtaatcagtgtgttccgagcgacgttttcaacaatccccagttttttttactcgatcttactgggcataaaataatgatttgcattctgtgttccctgagtgttctcctttttcaaatgtcattgcaattcggactgatctttcgtcaattgctcaaacacgaacccgtttctagaaatacacagcgactgcaacatcagtttttcattgcaatgagcttacaagtaatcattccaattgttatcatagcttttccagcgttttattttggtttctcggtttacttcaattattataaccaaggcgcaaataatctcacattcattttaatttccatacacggagtactgtctactataacaatgctcatggtgcatacaccgtatagaaaatcaattatcgagatgcttcatctggattccattcagtcaggtggcagagctcgtttgatttggaagttttcaacaagaacaagtaatagattttaa

SEQ ID NO: 461 - DNA, 986 bp, Caenorhabditis elegans
atgtgctctacaagtcttgattttcttgcttcagatgaagtttattcaaagattctacacactctcactatgatcgaagttgtaactcattccctcggagcatacattataatttcgaaaacgccgaaaaaattggagtccgtgaagacttgcatgttactattgcactttgtcggagcatttgtcgatgtctattttagtattttaactatgccagttttacacttacctgtttgcggaggccatccactcggcgttctagcattacttggagttccaacttcattgcaaacctatgggtgattgcgacgatcctaatattcctcgacgatcgtcgatatcgattgattcacggtcacaagaccagcacaactagaaaatggcacagattattgtatgtgacagcccagtactttttgactgccgcatttccagctcctatatttctcaatctgcctgaccaggaatacggaaaactgatgtcacgaaatataaatacgtgcattgcatctgatgttttcaatcatcctaatttttttctacttggcctcactggaaaatacattgtgatttgcattgtgtccgcgttgagccttctccattttcaaatacttctgcaaattgggctcattttccgtcaattgctcaaaaatagacctgtttctagaaataaaaatcgtttacaaaatcagtattttgtagcaatgagcattcaactagtcattccaatagtcatacttgcttttccggttgttcacatagtgctctcaatatatttaggttatcataaccagggtgcaaataatctagcgttcattatcatttcattacacggagtattatcaactattacaatgctgatggttcacagaccttataggaaatcgatttttgaaatgttacacgtggaatcgtatcacacggcggagagcagggaacgacatatttggagacttcaatcaagaagaagcttgcatcaattttga

SEQ ID NO: 462 - DNA, 945 bp, Caenorhabditis elegans
atgtgctctacaagtcttgattttcttgcttcagatgaagtttattcaaagattctacacactctcactatgatcgaagttgtaactcattccctcggagcatacattataatttcgaaaacgccgaaaaaattggagtccgtgaagacttgcatgttactattgcactttgtcggagcatttgtcgatgtctattttagtattttaactatgccagttttacacttacctgtttgcggaggccatccactcggcgttctagcattacttggagttccaacttcattgcaaacctatgggtgattgcgacgatcctaatattcctcgacgatcgtcgatatcgattgattcacggtcacaagaccagcacaactagaaaatggcacagattattctcctatatttctcaatctgcctgaccaggaatacggaaaactgatgtcacgaaatataaatacgtgcattgcatctgatgttttcaatcatcctaatttttttctacttggcctcactggaaaatacattgtgatttgcattgtgtccgcgttgagccttctccattttcaaatacttctgcaaattgggctcattttccgtcaattgctcaaaaatagacctgtttctagaaataaaaatcgtttacaaaatcagtattttgtagcaatgagcattcaactagtcattccaatagtcatacttgcttttccggttgttcacatagtgctctcaatatatttaggttatcataaccagggtgcaaataatctagcgttcattatcatttcattacacggagtattatcaactattacaatgctgatggttcacagaccttataggaaatcgatttttgaaatgttacacgtggaatcgtatcacacggcggagagcagggaacgacatatttggagacttcaatcaagaagaagcttgcatcaattttga

SEQ ID NO: 463 - DNA, 1104 bp, Caenorhabditis elegans
atgggcactacggctcccgttgtgataacaccgtcgtcagaaggttgcttatctcctgctcccgatccatacaaatccatgatgcattttactcatgttttgacgattcctttgtatctcactgcaatatatgctctaataaacaattgcccaaaaactctgaaagaataccggaaatatcttttatggcatacattgggaaatcttttattcgaactctacatttctttgttcatgcttccggtaacctacctaccatatccagtttttcgtggagccggatttttgaaatatctagatatcagtgggctcattcaattttatctgcttgttatatgtttgatacacacaggattatcgattctcgagatgttcaagtatcgtttcaattcgacaattagcgatgatacgttgaacaagaaagttctgaattatatcgtgatgtttttctgggtgattgtgattattattccagtgttctgttttgcaactcttcccagatgtcatccaaagcaagatcattataaacaagatttatatgataaaaatcctggaatatctatccacgtgttatgcaataccgttgtgactgcaccacctcttattgacccagtattcactccacttatgacacttattatgatggcaatgctccttgctgcaaccataatcccacaaacatttttaacaatctggaagaaacttgaccaactttcgaaacacttatccaaaaagaccatacaactgcagaaaatgttgctgactagtttgttcattcaagccgtcattcatggagttatgctaggtgcaccactaattggatttatctacgcagttgtatttgtactgccatataattacattgcctacatgcttcttctacttatatcctttcatggttcattttcgacaattgcaatgatagcttttactaaaccaattcgtgaaggagtcaagtccctgtttcagtcgctattcccatttttaatactttcggaacctcgaactgaaaagatcatggtagttacatcgacaacgtcagcttccacaaaacaaagggatagcattttcatgtctaataaaaatagttttctcagtgtctaa

SEQ ID NO: 464 - DNA, 1002 bp, Caenorhabditis elegans
atgtgctctacaactctcagcttttttgcttccgacataaattattcaaaatttctacatgcttttactatacttgaaattttcattcactcttttggagcatacatcatcattgcaaaaacgccgaaaaggctggaatccgtgaaggcgagcatgctgtttctacactttgttggagcatttgtcgatgtctatttcagtgttctcattatgccagtgctacatttgcctgtttgtggaggccatccgcttggcttactttcatttttcggcgttccagtcttattgcaaacttatgtggggctttctttacctgcagtaatagtcgcgaccattgtggtgtttctggatgatcgtcgatatcggttggttaacggtcaaaagtcgagcaaaatccgaaaatggtatcggttattgtttgttacatcaagttatgtttctgctaccatgtaccctgcgccggttttctttttgctccctgatcaagaatctggaagacttgtattgaaaagtaaaagccagtgtattccaaccgatgttttcgatcatccaaacttctttttactcgatctcaatggtaacaatattgcgatttgcatgttattattgatgattattcttatatctcaactgttgatgcaattcgggctgattttccgtcatttgctcaaaagtacacccatttctagaagcacaattcgattacaacaacaattttttatcgctatgagcatgcaagttatccttccaattgtcataattgcttttccagctttctatattcttttttcaattatatctggttatcataatcaaggtgcaaccaacatagcgttcatggtaatgtccatacatggagtgttatccactttaacaatgctcatggcatacagacattatagagaatcaattttggaaatgttgaatctgaatttatatcggtcaggtggtagtgctcaacgtatttggaagctttcaaaaaggacaattactcgattttag

SEQ ID NO: 465 - DNA, 1004 bp, Caenorhabditis elegans
atgtgagcaaaactccaatattatctgataaagacacatatcatgcaaatgctcttcacatccttacctcgttcgaggttcctattcatatcttcggtgcttatattatcatagcaaagactccaaacaatatgaaaaatgtaagaacgaatatgctggttcttcacttggcgggtgccttattagacatttatatgagttgcctagaaattccagtattccttttacctgcctgcgccgtatatccacttggagtactaacgatgcttggggtttcaactgtttttcaagcctacgtaggggtttcccttattggagtgattggaatggcgattcttatgttcttcgaggagcgatatcacaagttaatcagaaatccaggtgtagatagaaaacgtggctggaagtacgttgtatacattgctattcactatattatttcaataacgttcattctaccttgctttttaaatattcccgatcaaaatcttggaaaactaatgattatggagacaaatccctgcattccagaagaaaaaataaatcatcccgatttttttctattaatcactgaatctggtccgctctacttgagcctcggaatcgcggctcttgttattctcccacagggcgcatttttcatcttaagtatattttggtatcttttcacgctgaaatcaaaatcgcgagccacaactcgtctgcaaaaacagttgttcttcgcaatgtgcttacaagtagccattccaatttccgctatttgtattccagccggttattgcgttgtagttgttgtcgtcggttattacaatcaagaagccaataatcttgctgtatttacaatggcacttcatggaggtctatcaacgtttgttatgctgaccgtgcacgcaccttatcgaaatgcgactttggaagtatttggaattagtttcaaacgagtcgtacagaaacctaatcaagtttggaacaaatcagtcaatgaaacaggagtagtaccgtag

SEQ ID NO: 466 - DNA, 996 bp, Caenorhabditis elegans
atgtgcaccgaaactttcagttacctggcgagtgaccaactttatgccggtgctctccacattttcacagcttttgaagtcccagttcacttatttggtgcctatattatcattttcaaaacaccggataaaatgaaatcagttagaactagcatgctttcacttcacctggttggagcttttgtggatttttttactagttttcttacggcgccagtcctaattttaccggtttgtgcaggctatccactgggagttttaggaatgttaggtatcccaacaagtgttcaaacgtatttcggtctctcatttttagcagtgcttgcttcggcggtgattttattctttgaagaacgatatcacaagctggccaacgtgcaaaggtcaagcggaagaaaaagtttctcaagaaaatgttacgcaattgggcattacatgttcgcgatgctttttatttctccttgctatttcaatattcccgatcaagaaatcgagaaattaactatcaatgaacgaataccctgcttgccagaagaaatcctctcccgtactggctttttcattctgtcaattgaaaacagggaaatgtatataagtcttgcattattgatttctgttctcgttcctgaagtattgttttttgttctttctatcttctggcacctttttaatataaagtcacaatcacgggcaaccaatcgactccaaaagcaattgttttttgcaatgtgcttgcaagtatacattccttttatggtcgtaaccatacctgcggcgtattgtatatcttcaatagtttttggtcattacaaccaggctgctacaaatcttgccatgtcttcaatagcagttcatggaatcctattaacaattaccatgctcattgtgcacgcaccttatcgtcaagcggtcttagaaataatttgcaatcgttcaaaaatggctactattaataacccacaaatttggaaaactgtcaatgaaacaaaattgtga

SEQ ID NO: 467 - DNA, 993 bp, Caenorhabditis elegans
atggattgtgctgaaactgatcataatgaatactattggattatgcatggcattttcattgtatctcttccaatatattcgattgcaataattgcccttttgcaaacaaaatctccgtattttgaaaaatataaattgtttttgatttggcacacttccacgaatttgttagccgagttgttaaactcctggtttttgattccagttgttcatgtgaatcttcctattttaagatttactggaattctgtcacattggggattttcaggattatttcagtttttcgtaattggcactatgatatacttgaccgcatactctgtacttgaaatgtttatgttccgtttccgtgcaagtttattcaactataaatcaacatatttttatatctacttaaaagctaatatatatctcttccgattcgcaatgttatgttttttaactttgaatatttgtacctacagttttgcaatcgatcaacagactgtgaacaaatacagtttatcattgaagtttcccgatgcaccttcaattatactatgctatactgtcattgcatcagctccatttgctgatcctgcgacaatgttcaatgttttgatatggttgagtgtggtgattgtaaccttgacatctacaattgcaactacagtataccttcagaggaatctgagagagaatgagcattattcggaaactgttgtgagaatgcacaaaatgcttttgattacattatccattcagactgcaattcacggaatcatgttaggaattccaaatgcattattcatttttgccgcattttttggagttcgccatgaatctgttgcaaaactttcattcatttttctaacaactcatggattagcttcaactattgcaatggtcgtgctcacaaaaccaatcaaaattgctgctatggaactttttaaatgcagaagtggcgataaagtggtggagactgataatagaagaatgtctagaaaattataa

SEQ ID NO: 468 - DNA, 1002 bp, Caenorhabditis elegans
atgtggccggacagcagaagctcacttccattagacacatactacgcaggaattcttcatattctcacttgcattgaaattccactccacactttcggagcctatctgatagttgcgaagactccgaagaaaatgagaatggtgaaggctagcatgctgatgctccatttttctggagcaatcgtggatttttatctgagcttcatttcaatcccagtgctcactttacccgtttgctctggatatccattgggcttctcgctagttttaggaattccaacgtctgttcaagtttatatcggagtttcatgtatgggagtaatcggcgtaactattctcgtattttttgaaaatcgttactttcaattaatcaatggaagttctggccgcagaagttggaagcgaaaactatatgttctgtgtaattacgcgttttctgcaactttcatagctccagcgtttttagacattcctagtgaagaacaaggaagaacgtacacttttgaaaaaatcccgagcatccctatcgacgtgccttctcgtcctggttattttgtcctattaattgataacccaacctacagtatttgtgttagtctcttagtaattatagtttgtccacaaattggtatagtcgttttgttcatcttccgttttatcgttaacacaaaatcacattctcgagccacacagcgtttacttcttcacttcttcatagcgatgtgtattcaactgtctattccatttttggtcatcttcttgccggctgcctttatagtgtacgcgattcaatatgattattataatcaagcagcaaacaacttggcgatggcaacaatggcattccatggggtatgtactacactgaccatgatcatcgtgcatacaccgtatcgtaacgctactttgagcattttacatctgaaatcggagaaatcggcaaaaattgtgaatgattcgaatattgtgtggaaaactaacaagggactacagatgacataa

SEQ ID NO: 469 - DNA, 993 bp, Caenorhabditis elegans
atgtgctccgaactccccgcgctcaattattttggctccgacactttctactcctcaacgctacatgttctcacagcaatcgagattcctattcacatttttggggcttatatcatcatcacgaagaccccgagcaaaatgcaatccgtcaagcgtggcctgctctttctccactttgccggagcaattctagacgtctactatagtttgatagccgctccggtcctgacgctcccgatttgcgcggggtacccactaggaatatccctgcttctggggatcccaacaagtgtccaggtttacctgggtatctcgtttgttggggtcatcggtgtgactattatgttattctttgaagatcgatatcaccgccttgtcaacgggcacaggaatgatggagaatggtgttggtggaggattttgtatttggttatacattacgttttgtctgtaacgtatattgctccgggattttttaatattgtggatcaggactttgcaaagtcgtttgtgaaaattaaaatcccatgcatccccgacgagatcctgcatcgccccggatactttgtcctagccgtggacaacacaatccccaagtattgcatagccttcatgctaactctagtcatgtcccaagtgtttttctacgtcggagccatcttctggcaccttttccacacagttgctcagtcccaggctacaaatcgcctgcaaaaacattttttcctggcgatctgtgttcaggtgttcattccaattttactgataacttttccagtgctttatattgttttggcaatttggtttgggtattataatcaggccgctaccaacattgctcttttggctatcccattccatggagttttgtcgacaatttcgatgctctgtgtgcatcggccgtatcgagaagctacttttggaatgttttataataaaggggacacctcacggccaatttggatgacagtacatgggacatcgatacattag

SEQ ID NO: 470 - DNA, 990 bp, Caenorhabditis elegans
atgtgcccggaaacctccagctacctggcgagcgattcgttctacgcaggaattctccacattatcaccacaataggagtccctatacatctattcggagcctatataatcattttcaagacaccgtgcaaaatgcagtccgtcaaggccggcctgctctttattcatctagtcagtgcgactttggacgtattttttagctttctcgcggctccggtcctaactttgcccggttgctcggggtatccattaggaatctctttgctattaggtattccaactagtatccaagtttttatagcagttactttattcggcatcatcggcgttactattatgttatttttcgaagatcgctatcatcgtctgatcaacgggcacaagtcgaaaaattggatccgaattgtgtatattgttatacattacactattgctctgagttacgtgatgcctacatatgttagtgctccggatcaggacatcgggaagatttggatgaagcagaatgtcccatgtctcccggaagaagtcctccatcgccccggatactttgtcatcgccaccgacaacaccatccccaagacgtgcctagccttcatgctaaccctagtcatgtcccaagtgttcttctacgtcggagccatcttctggcacctattccacactatttcaatctccgccgccacaaatcgcctgcaaaagcaatttttcctggccatctgcattcaggtgtttattccattactgttattgacccttccgtcattgtatattgtgttggcaatttggttggagtactataatcaaacaaccacaaacctagctgtaacaatgatcccgctacacggagtgctatcaacaattaccatgctcatggtgcatgctccttatcgccaggccacaattgatactttttgcgggagctccaccacgaaaagtaactctccacaaataaggatcacgggcaacgaacttcaaacagttttttga

SEQ ID NO: 471 - DNA, 990 bp, Caenorhabditis elegans
atggattgttcattaatatctactgctgaatatttagatgttctacattttctatttattgtatcatttcccatatatacagttgcaattatagcactttttcgaacaaaatccacgtattttgaaacttataaacacttcctcgtatggcatacagcttcaaaccttatctcagaaatctacaatgcatggtttttggctccaaaagtgcacttaccatatccgctgataagatttactgcaattatgacacaactgggatttagtggattatttcagttttatacaattaatgctctaattcatcaaactggttattctataattgaaatgtacatgtttcgattcaaagcaagtacttacaattttcaatcaacatgcttctatgtgtacttacaaatcaatctctatatttatcgtattactcttgtcttattttttgttgtaaatatcacaacttataacatcagtcttggacaacaaattatcagtaaacaaaatcttctaattcaacatccggaagctccttggcttgtaaattgtgactcggtggttgtggctgctccatttacagatccaatttctatgtttaatgtagttgtttggattgttataatctttgtggcatctacgtcaactttttcaacaacaatttatcttcaaaaacatttaagcaaatcagagcatcattctccggcagttttgagaatgcatcgaatgcttctaatcactctatttgttcagacagcaattcacgcagttatgttgggaatccctaactcgatgtttatttatgctgtattttttgaggctcgccacgagtttctggccaaaattgctttttgctgtcttacatatcatggattggcttccacgatcgcaatgatgacgttgacaaaaccgatcaaaataacaattcttcaaatgttgagatgtcatgctttgaagaattcagtatcaactgtacaatattcaagccaaaatacttaa

SEQ ID NO: 472 - DNA, 978 bp, Caenorhabditis elegans
atgtgctcaccgccaagcttcctggccactgacgagttttattctggagttcttcatattttaacagccattgaagttcctttgcacatattcggagcctatgttatagttacacggactccgagtaaaatgagcggtgtcaaagcaagtttgctccttttacacctggttggagcatttgtcgacgtttacttgagctttgtgacgactccggtgttaactctgccggggtgctcgggttattttttgggagtcacgctatggttggggctgcccagtgatgttatgtcgtattgggatatttcactggttggagtcctctccgtcaccatcctaatgttcttcgaagaccgctacttccgccttaccaaaggtccgacaggctcgcggagctggaaacgtgtattttacattacccttcattatttcatatcagtaacatttattgctccggcgtactataaaaagatggatcagcaattgggaaggctgctgacaaagcagacgatcccgtgcatgcctggcgaagtacctgcgcggccggatttcatagtcctatcaatcgacaaaacattaccaagcctgtgctttgcctttatgttcgcattaatcttccctcaaattctatttttcgtcatccgaatctcatggttcctctaccacaccgtatcccaatcccaggccacaaatcgtctccagaagcaattttttgtagctctatgcattcaggtgtttattccactggttttcatatccatcccagtagcctatatcattctagccgtctatctggactactataatcaagctgcgaacaattctgcgctaatcgcaatcgcatttcatgggatcttgtcaacactgactatgctcattgtgcacacaccttatcggcacgcaactttggagtttttcaatatagagcagaagccgaatacagtgagaagctcgcatgttggaggcgatgggaagatttag

SEQ ID NO: 473 - DNA, 996 bp, Caenorhabditis elegans
atggctacctgtcaaaatacccaaaacttcctggacactgacgatttttattctatatttctacatattctgactataatcgagattcccgttcatggttttggtgtatatataatactagccaagacacccaccaaaatgaaaagcgtcaagggaaacatgctacttcttcatctcgtaggagcttgtgtagatggttatataagctttttcacttctcccgtactaaatttgccggcatgttctggatatccattaggggttctaacgaaacttggggttcctacagcgattcagttgtactttggaatttcttcagtcggcgtgatagtcgttacgattctaatattcttcgaagatcgtcaccatcgacttattaatgggcacggcgggaggggatggcggagggctttatatatagcggtgcattacacaatctcacttacatttcctataccgacatatctgaacatcccagatcaggaactagggcttgagctgacaataacggaagtcccatgcctcccacttgatgtcttcaaccgtcctggatacataatcttatcaattgataactctattccctgcttatccatgattttcatgctatcactgttcattcctcaaataatcgtatttgtaatttcaatatcctggcacttattccgcacaacttcccaatcagcagctaccagccggctgcaaaagcaatttttcttcgcaatgtgcctgcaagtgttcattccaatatttgtgctagcatttccagtgatctatattattatgtccattgtgttgggttattttaatcaagctgcatccaaccttgcaatttgcacaatagcatttcatggtgtgctctctaccgtcaccatgcttattgtacatacaccttatcggcaggcgacacttgaaatattccacttgagctctaaacgaggagccaattctcaactgatttggaaaactgtgaacaggtctcagcaggataattga

SEQ ID NO: 474 - DNA, 1011 bp, Caenorhabditis elegans
atgtgctcacaaaatataagcttttttgcaactgatgaattttattctggagtcctacatgttcttacttcaatagaattaccgattcatttatttggtgcatatattattgttgcgaagacaccaagaaaaatgagaacagttaaagcaagtatgctcgcacttcattgtattggagcatttgtagatttttatcttagttttattgcaattccagtgttgactcttcctgtttgttcaggatatccacttggattttcattagttttaggaattccaacagatgttcaagtttatttaggtatctcatttgttggcgtgatagctgttacaattttattattttttgaagaccgtcatcaccgtttaattaatagtaacatttcgaatggtgctagaaactggaaacgtgttctgtattcaattattcattatattatttcggtcacttttattgcaccgggatatatgaacattccggatcaactacaaggaagagctactgttcaacaggagattccatgtatcccaaaagatgtcataaatcgacctggttattttgtactatcaatcgtgaatacaattccttgcctttgccttattttcatgttttcactcatcattcctcaagctttatattttgttctttctattttttggtatctctaccacactgtttcaaaatcacaggttacaaatcgcctccaaaaacaatttttctttgctttatgcattcaagtattcataccaatttttgtgttatcatttcccgttctatacatagttttggcaatttggttcaactattataatcaggctgccacaaattttgcactttttggaattgcacttcatggaattctatcaacgctgacaatgctttttgtgcatactccatatcgtgaagcaactttccaaatattccacgtcagtacgaaacgaactgcaaatggttctcaacaaatatggagaacaaccgttggaacacaagcacagcaaagtatttggtaa

SEQ ID NO: 475 - DNA, 1002 bp, Caenorhabditis elegans
atgatcgattgtattcccgaatcaggctatttcgatagtcccgattttctagctaatactatgcacgtttttacagtgatcgctacaccaattcatatttttgctttttattgtgttctcgcaaaaactgaagaccaaatgaaatcagttaaaatgtacctactcaacttacattcgtctatagtattgttcgattattcactaaattttttatcatgcccatttattttgataccggaattagctggctatccacttggaatttttaaatacttcaatgctcctgtagaatattacgttgtggaagtgggcatcgcaggtgcttgcatgataatatcagtagtctcgatatttgaaaaccgattttatgtgatttgcactttttcgtggagggatcattggaccattgtgcgacgtccttggcttttgctgcattacattgagatctttgtctttatgttctcattaacactgattgttccggaccagaaaattggtttggaacttgtttttgagaacttgccatgtcttccaaaagacatttatgaggctccggtattcgtgctagccagtgattatacatatcaattgattgctgcggtatttataatatctcagctctgctttgaaattggatttttcgttacatatttggtgtggaacagctacaagcagttgaaggacatgaaaatctcgaagcaaactttcgagcttcaaagaaaattcttcatcgctctagttatccaattagttgttccatcagcatttttcgtcattccagttgcctatatgttggcctcattttccttgtattattataaccaggcattcacaaatgttgcgtttatcgttgtatctattcatggagtttcttcaacattagcaatgatttttctccatcgaccctatcggcgtgcaatttttaaaatgatctacaaaagaggctcatatccttccacagtctctaaaatacgctctacaactggaataacagttatttaa

SEQ ID NO: 476 - DNA, 1032 bp, Caenorhabditis elegans
atgaactactcatgtattgcaaaagccaattatttcgataatccagaatttttccttctttgcatgcacattgttactgtaatatcaataccaattcacttttttggaatgtattgtataatttataaaactccggtggtgatgaaaacagtgaaatggtacctatttgcgttgcatgtttggattatcgcatttgactattcgtttagttttctaacggctccatttttattgattccaaaacttggaggttatattcttggtattttaaaatacaccagtatgcctctggactatctaacaagtatagttatgggtattggtgcctatatgggaatttcaatagtgtcaatttttgagaatcgattttatattgtgtgcgattttgcgttcaaaaatcattgggtcgttttgaggcgtatctggttagccactcattacgtcattgttccaactttcctgactccaattgtttttctaactcccgatcagaaaattgcagtacccctcatgttccagaaacttccatgtcttcccagttatatttatgaagctccaattttggtgttgagtgaaagtcttacttatcatgctactatctcagttgtttatatatttctagttttgattgaatcttttatatttgtgggataccttattttcaacatcgtcaagcaaatgaaagagcataaaatgtctccaaaaacgtttgaacttcagaaaaagtttattattactctactcattcaagtgtcaattccaatgatttgtttcatttttacattgatttatattggtttcgcatatttgattaactattacaatcaaggattgaataatgcaactctggcaatattttcctgtcatggtagtgtatcgacaatagcacttattgcacttcatgcaccataccgggaatacgcacaagatctgctgagaaaactttcaagaatgagcccggtggaagtatctcaaaaccaaattgccaatttgtcttcctccaaccattctaatgtcgttgtaaccgtataa

SEQ ID NO: 477 - DNA, 1032 bp, Caenorhabditis elegans
atgaatttctcatgtgttgcagaattcaattatttcgatactccagaatatttatcattacttatgcacattgttactatagtatcaattccaattcattgtcttggcctttattgtattatttacaagactcctgaacgaatgaaaacagttaaatggtacctgttcgccttgcattcttggattgttgtatttgactattcgttgagtcttttaacagttccgtttttgctcattccgaaaggcgcgggatatcctcttggtgtatcacaatatacagacgtccctttagtttatcaaacaataattatgatgtccctatttgcgtacatggtaatatccattgtatcaatatttgaaaatcgatttttcaacatttgcacattttcattcaaacatcactgggtatttttgaggcgtttatggctagctgctcactacattatagtggtcttgtttatgatccccatggtgtttttagttcctgaacaaactattgctgtccagcacacttttgagcaacttccatgtttacctaactacatctataatgctccagtgttcgttttgagtgaagatattacttatcactttatcatatcagtcatatttgttgttctttgttgtattgaaattagcgtatttgttggatatcttgcctcaaacagcttggagcaattgaagcaaaaacggatgtccccgaaaacatttcaacttcagaaaaagttttttatagtcctagtcattcaaatgtcaattccattgatatgttttctatttccacttatttctgcagcactgtcagttttactcaattattacaaccagggaatgattaatactggacttataatagcttcatggcatggaattgtttcaacaatatcgatgctcatacttcatagaccatatcggagagcagtgaaagctcttttttataaatctgaaatgagcaaccaggtggaagtttcacaaagtcggtttacgaacttgcgatcttccaaaacctccattgcagttgttaccgtttag

SEQ ID NO: 478 - DNA, 1005 bp, Caenorhabditis elegans
atgcacaactcgtgtcgtttcacatatttcgattctcctgaattcttaactctagccttccacaccacaagcctcatcgaaactccaattcattgcctaggattctactgtattttatggaaaactcctgaacaaatgaaaagtgtcaagtggtacatgttcacgttgcacacgtggatcctcttgttcgactattcgttgagcctactcaccgcaccgtttgtcctggttaatgaaggtgctgggtacccgcttggcttatcaaaatacacaaatgttccggaagtgtttcagtttatgatagtcattgattttgccacaaatatggcgatttctatcgattcgattttcgaaaaccgattctacattatttgcacattttcctggaagcatcactggaaattttggaggcgtgtatggcttgcagcccactatattcttcttattgtcctactaagtgttatcccatttttggtacccgatcagaatattgcagtgaaaaaactttttcagaacattccctgcctaccgaaacattttttggaggcgccgatttttgtggttgctgacgataagacttatcatatgatagctgcggtattccatatcgcactgatatgtttcgaagtatttcttttcgtcgtatttttgatcagaaacagcgcgaagcagctgaaggaaaagacaatgtcgcagaaaacatttgaacttcaaaagcgatttttcatcgctctagttattcaaataagcattccattggcttgcttcatatttccactggcttttgctgcattttcagttatcattggttattccaatcaggcagtcactaacgttctagttgtgacaattgcatctcatggtattgtgtcaacaattgcgatgcttttgcttcataagccttatcgaaatgcggtaaaagagatttggaatcggccatttggaaaatctgctgatgtttcacaaaaccaagggaggaacctttttattgctccacgagtttaa

SEQ ID NO: 479 - DNA, 1032 bp, Caenorhabditis elegans
atgaactatacatgtataccggatctaacctatatagacactcctgatttcttattgacagatatgcacattatcacaggaatatctacaccaattcattttcttggactatactgtatcatttttaagactcctaagcagatgaggagtgtgaaatggtacatgctaattttgcatatttatgttatgatatttgactactcctatacaattatgacagtcccttttgttctatcaccttttgctgcgggctttccacttggtctgcttcgtctcacaggaatgtcagttgttgcacagtcaatatattttataataatttacttttttatgttaaacggaatagtttcgattttcgaaaataggttttataaaatttgctcgttcacctcgaaaaatacgtggaaattttggaggattgtatggctagctgggcattatgtaatagaggtcctgctgatccttcctataaaatgttttgttccagaacagacacatgcactacaatacgtgtttcagaaccttccatgtctacctagatatatatacgatggtccggtttacgtggttgctgaagacatcacttaccatttttcatttattttctcattgcatgtgcttatttgtttcgaagtgattttctttttcggatatcttattcggagcggtcgtcagcaactgaaaggaaaaacaatgtctcaaagaacgtttcagttgcagaaaaagttttttatagcactcatttctcaagtttgtgtgccatcagttttctttattattccactaatctacgttgtgataacaattttaacgaaatattataatcaaggatatcttaatattgcattcacaattatcgctatgcatggacttgtttcgacatctgcaatgctttcacttcatcaaccctatcgggaaacaattctgaatacgtttcaaaaaacaccaagaaccttgtccaagatccaaaacttaaatgataagcggttgcacaggtgctcggctcgtgtagctcatatttcacctggttga

SEQ ID NO: 480 - DNA, 1011 bp, Caenorhabditis elegans
atgatggagacgagctatgatcgaagggcactggtactttggttccgaagatgctcggaggcacctaattgtggaggagcgccagcggggaaagcggatttctatggaaatattgtaggagtcggaacatgcgacattgctttggattttctcaaaagctcacattttttcgaagttttggcaaaatccccactggccctacttcattttcacttctgtggaaaatgcggaattttaatggaaattcataccggagccacttggaaaatctccaccagctttccgtttccgttgtgctccaatggttttttgggagaatacggtccggaatgttttctgattcttgttgtcatcctaatttataacggtctagcatgcatattcatattcctctaccgaatggaggtagccagcaagcatacggcaccaactatgttgtacaaaatcacacattttcaaacgtatcttttgtattttttgctagtgatgttatctggaataactgtttttatgtatccagttttgaaggaacaactggattataaacaaagactggaaatgaaagtcggaccgattccaacatttatgctgtgcgatagctgtgtctttatgatttacgactctcctatattcctaatttggttccttgtagcgtacatctgcatagcgctggcttacataatattgtttagctccgggattgtgacctacaaagctttgaaagtgagccgagcatctgcagccgttagaaaaattcagaagaacattttcatgagcctggtggtgtcgacaattactcaccttggcctactatttataccactggctacatttttcatgctctccctacttgtgcccgaatggagcaaaagctcgattgtaaaatacactagtgattttatggtgattatgattcaacaacacggcgcagtttccgcggtgaccatgtttctgacgaataatttattaaggagaaccgcgaagcaattattttacactgaaatgagttga

SEQ ID NO: 481 - DNA, 1056 bp, Caenorhabditis elegans
atgtctcgttctgttatacaattaaatattacatgtattccacaagaagattattttggctctccacaattttattccacctcaatgcatatagtcagtgtcattgcaactcccattcattccttgggattattttgtattttattcaaaactccagatcagatgaaatccatcaaattttatttgttagtcttgcatatttgggtcatggcatttgactactcactgacacttttcacaataccattcattttggctccaggacttgctgggtattcactcggtctttacaagtattttaacgttccgtttatgattcaagtgataatcattctcgcactttttgcttggatgatgttcgcggcagtttctatatttgaaaaccgattttacactatctgcaccttctcttggaaaaagcattggtcgttttggagacggccatggcttgcgatacattacattggagacgtcatacttctcattcctgttgctatttttgttccagaccaaaaaactgcgttaataaaaacttataagcgactcccatgtttgccacaagaagtttatgaagctcctattgtcgttgcagcggatgactatacttatcattttatagctgctttttttggtgtaatccttatcacttctgagattttcttttttgttggatttcttgtatcaaatagcattcaacagctgaaacaaaaaacaatgtctcagaaaacatacaatatgcagaaaaagttgttaattgctctcgttattcaaagttttgttccgatgacttttttcatgtttccactggtttatggtatggttgttgtgataaaagaatattataatcaagctattgtaaatattctatttataaacggatcaatgcacgggtttgtatccacacttgcaatgctttttcttcatcgaccatatcgagaagcaaccttgaacatttttagcgtattacagaagaagccatcgccagaaatttctcataatgttgttagtaataattacgttccaagaaattcaaccaggcgtgttcaagtatggtga

SEQ ID NO: 482 - DNA, 1020 bp, Caenorhabditis elegans
atgaatctaacatgtacacctaacttcaactactttgattctcctcaatttctatccataggaatgcatattgcttctgtagttgttacaccattccacctacttggcctatactgcatcatatacaaaactccgttgcaaatgaaagctgttaagtggtacctgctaaacatgcactgttcagtaatgttttttgactattctgtaacagtgctaggtattccgtttgtgttggctactaagttagcggggttttcacttggattgctgcaatactcgaattactcatttcttttgtcggttgcagttatggcgttgtcttgtcagtttctcaccatatcaatcgctggcatatttgaaaaccgatttaataccttttgcaattttttctgggtgccgttttggaagaagtttatttcaccattgtttctaccctatcaatatatagtttacccatcactactgtcaagtgggttgttatttataccggatcaggaaacggcattgaaggcaatgtttaagaccctcccctgcctacccagcgagatctacgaagcagacatatatgtgatagttgaagacatgacccttcacgcaataatgatctctatcggtgtatcaggagtccttatccaagtggtattttttgtcggctcactgttatatagtagtttggagcagttgagagcaaggacaatgtcacagaagacgttccagatgcagaagcagttcctcatcgctgtgattctacaaagttcagtccccttggtttgctttgcaattccaattatctattttttaattgcatatttaaaaaactattataatcagggaattatcaactgtctatttataaatacgtcgactcatggcctgatctctgccatagccctggtgacccttcacaagccgtatcgggcggcggtgttggtgatgattgccaaaacaccggagctgagaatcgggccgaaaatatcgcaattatcaaatttatctagatcgggagttgttatattgtaa

SEQ ID NO: 483 - DNA, 1017 bp, Caenorhabditis elegans
atgaacacgacatgcacgcctaacttcaactactacgattcacctcaatttctatctacaggtatgcacatcgcttcggtaattatcacaccagtccacctactcggcttatactgtattatatacaagacccctttgcaaatggcggctgttaagtggtacctgttacaaatgcacgtttccgtgatggcattagactattcggtgactgtagtgggtattccgtatgtactagcaactaggatagctgggttttcgctcggattgttgaaatactccagctactcgtttcttttagcgatttttgttatgatagcctgtttgcagtttgtgacattaggaattactggtatattcgaaaatcgattccgaatcatttgcaagttctcctgggtgccactttggaaaaaattcattacaccagggtttttgccgggtcagtatattgtgtacccatcgtttctgctacttgggataccttttattccggatcagaaaactgcattgcaggatatctttaagacccttccctgtctgccacgtgaaatctacgaggcagacatctatgtgatagctgatgacatgacttatcatattatggcgatttcaatgggattgtcaggagcaattagtcaaattatatttttcaacggctgtcttatatatagtagtttggagcagttaaaggcaaaaacaatgtcacaaaagacgttccaaatgcagaagcaattcctaacagcggtggtcgtgcaggctgcatctccaatgatatgcttgataattccacttatatattttacaatagcacacttggtggggtattataatcagggaattatcaattgcttacttattaatgtatctattcacggtctaatctctacaacagccctggtgactcttcataagccttatcggacagctgtgcggagcatgatctcgaaattgccagagccaaggcgaccgaaagtctcacagttatcaactctttcgaggagcactcttgtggtgttgtaa

SEQ ID NO: 484 - DNA, 1017 bp, Caenorhabditis elegans
atgaacacgacatgcacgcctaacttcaactactacgattcacctcaatttctatctacaggtatgcacatcgcttcggtaattatcacaccagtccacctactcggcttatactgtatcatttacaaaacccctttgcaaatggcggctgttaagtggtacctgttacaaatgcacgtttccgtgatggcattagactattcggtgactgtagtgggtattccatatgtgttagcaactaggatagctgggttttcgctcggattattgcaatactctagctactcgtttcttttagcgatttttgttatgatagcctgtttgcagtttgtgacattaggaattactggtatattcgaaaatcgattccgaatcatttgcaagttctcctgggtgccactttggaaaaaattcattacaccagggtttctgccgggtcagtatattgtgtacccatcgtttctgctacttgggataccttttattccggatcagaaaactgcattgcaggatatattcaagacccttccctgtctgccgcgtgaaatctacgaagcagatatctatgtgatagctgatgacatgacttatcatgttatggcgatttcgatgggattgtcaggagcaattggtcagattatatttttcaacggctgtcttatatatagtagtttggagcagttaaaggcaaaaacaatgtcacaaaagacgttccaaatgcagaagcaattcctaacagcagtggtcgtgcaggctgcatctccaatgatctgcttgataattccacttatatatttcacaatagcacacttggtggggtattataatcagggaattatcaattgcttacttattaatgtatctattcacggtctaatatctacaacagctctggtgactcttcataagccttatcgaacggcggtgcggagcatgatctcgaaattgccagaaccaaggcgaccgaaagtctcacagttatcaactctttcgaggagcactgttgtggtgttgtaa

SEQ ID NO: 485 - DNA, 993 bp, Caenorhabditis elegans
atggattgccttgagccaccgccggctactttcagaattttgtctcactctatacatttcataagcatcccaatctactgcttggctctctattctttgatttttataaagtcaaacgttttcacaacatatcggatttttctgatttggcatgtctcggagaacatattttttgaaatgtattctgcatttttcctggctccggctctccatgccccatttgtcgtgatgaggactactggaatcttgtcacattttggaataaattcgctggttcaattttatatactcacattttcaattgaatgtagtgcagtttgcatcagcgaaatgttctattttcgatacaaagcaagtctcgtgagttacaaggatcattatttcacatattttcttcgctttctcgtgtactctacgagatgctttgcgatatttgacttcatatttccgattgtgacctatcaagatgctaataagttccagcaaattcacaaattagctttgctgcagcagaatccttctgctcagtttttaagatgtgattcggtttatcttctttcagcatttgctgattacgtatcaattattgttttgtcattttggatagtgcaatttgtagttctctgtgttgctattcccggtgcaattgtgtacatcaccttaaacataccaaaatccacttctgaaactacatggaaagttcaacaacagctattgaaaagtcttgcgattcaagctctgattcatgcgatcatgttggggggacccaattcattatttattcttgcattgtttttggggtataatagcgaagaacttgcgtactctgcgttccttagcttgatttatcacgggtttatctcaacatttgcaatgatagttttcaccaaaccagttcgccatcatattttagagtgtctcaaactgaggaaaacttttgaaacaaaaggaaattcactgaagaaatcgaaccaaggaactgtaaccacataa

SEQ ID NO: 486 - DNA, 972 bp, Caenorhabditis elegans
atgtcgtgctccgatgaatacagttactttagctcagcagacttcatggcttcagcatttcacgtgcttacgtcaatcgaggtacctgttcatatatttgttggctatgttatcctattcaaaactccaagtagaatgggaaatgtgaaatggttcatgtttcatgttcatttttggagcgctattctagatgtgagcttcacgtttctggtgactccgtactttatttttcccgcaactgctggctattcacttggggcttttatttggattggactagatcctgcgattcaggtgacagttttggttgtggaaattggattgacaattctatcaattctaatccttttcgaaaatcgatatacatttttggcgtcatcaacaaaccactggaaacgagtgcgacaagcgtcttttgtgattttatatattgttgctctaacttattttataccatttatttttcaagtcccagatccggaaatttctgttccagtcgtgctcatgcaacttccaactctgcgatgcttctacaaaggaccaatatttgtcttcaccttggactccaccgttgtcgcaagaatcacaatgctaaagttaattatcgagttcagttacctcggtctactagtatacttgacatttcaaagtcttatcaagcaaacgaaaaacgctgtactctctcgtaacaccttggctctccagagaaaatttttcatttcaatcataacacagacaattattccatttgcaattattattctcccaatttcatattgtgggtattctttatctcaagaatattataatcaaactttcaataatattgcatttattattatttcttctcacggattgatatctactattgcgatactgctgattcatgaaccgtatcgaaaaacattattttcatcgttctgctgttctcggacaaccaggacacatccgacaaactctcaggattcataa

SEQ ID NO: 487 - DNA, 993 bp, Caenorhabditis elegans
atgacctacgacttctgtactagcactttctacttgtacactgcagattttcaacgcctgtttctccattatttcggttttttggcgattctggtgcacgtctacggcgcgtattgtatcattttccacaccccatcgtctatgaaatctgtgaagctgagcctattgaattttcacttcttcagctgctttttcgatttgggcctcagttttttgacgacaccttacatattgttcccagcactagctggttatccattgggtgtcttgaaggattttggagtgcggaatgagcatcaggtgtattttatgcttttggttggagcttacatgctcgtcgcaatcatactcgttttcgagaatcgtcttctcatgctcgtcccaaccgtcaaattttggaaggcatttcgagttccgtggtttattgcccatttaattcttgtcaccgtgttcttgctaccaatctattcactgattcccgatcaggaagtggcgaaaaactcgatcagaagaattgctccgtgcattccgctatacgtgaatgttgacttggtttttatcctcttcattgaaactgggcttttcatgagaacgactggagttcttattttattaggattcattgagacttggattttagcctttatcacgaatgaacagttgggaaagcagatcaacctgattttgtcgaaaagaactgtcgagttgcataggaagtttcagaaagcatttatcacacagctaacaattccaatcatcatccttataattcccataatctatgtaggtgtgaccagtcttttatatttccacaatcaggcaatcaataattttattgtgatcattgtgtcgtcccatggatttttctcgacaatcgtgatgatttgcattcacgtgccgtaccgggagtttacgcttcggtggctcactgtcttggcacatgttcgaatggaaaatctgagttcggtgcggccgagcaataacattacatga

SEQ ID NO: 488 - DNA, 993 bp, Caenorhabditis elegans
atgccgcacgacttctgtactagcactttctacctgtataccgcagattttcaacgtttatttctccattattttggttttgtggcgatcccggtgcacgtctacggtgcctattgtatcattttccataccccatcgtccatgaaatccgtgaagctgagcctcttgaattttcactttttaagctgctttttcgatttgggcctcagttttttgacgacaccttacatattgttcccagcactagctggttatccattgggtgtgttgaaggattttggagtgaggaatgagcatcagttgtattttatgcttgttgttggagcttacatgctcgtcacaatcattctcgtcttcgagaaccgtctactcatcctcatcccgacgagcaaatgttggcgtgtatttcgaactccgtggttcatcacgcatttcatcgttgcaacagtgttctttttccccgcgtaccaaatgatccccgaccagcaactcgcaaagaactttgtgataagcatagccccatgcattccactttatgtgaatgctgacctggtttttgtgatgctccttgaaactcgatttttcctccgagcagctggtgttctaattttggcggggttcatggagatttggatatttgcatatgttaccgatagattgcttgggcaacagataaatcggacaatgtcgaagaggacagtggagttgcacaagaaatttcaaaaagcatttctgacccagctaacaatcccaattcttattctcatcctgcccatcatctatatcggtgtttcgtgcctagtcttctaccacaatcaggcaatcaataatattactgtgataattgtgtcatcccatggtttcttctcgacaatcgtcatgatttacatacacgcaccgtaccgcgagtttacgcttcgatggctcacggttttgacgcatgttcgattggaaaatcagagttcggtggtgccgagtaataatattacatag

SEQ ID NO: 489 - DNA, 1005 bp, Caenorhabditis elegans
atggtatacgactactgcagcattactgactacctttacactccggacttttttgagacagtactccatgtgatcagttatatctcaattcctgttcattgctacggaggcttctgtgtatttgcaaagacaccgatatctatgcaatctgtgaaatggagtatgatgaatttacacttgttcagttgtctttttgatttgggagttagtttgttcacgattccatatatattattcccagtactcgctggatatccattggggcttatgcagaagtttggagtaccgattgaaattcaagtgtacgtagtgttatttgttggagcattcatgttggtctccatcaccatcgtcttcgaaaaccgcctattcgtccttgtcctctccgacaaaacccttcaacggttccgtactccaatctacattctccattatatccttccaataatcttcctcccggcactggtcaacattcccgaccagaaagccgggtacagaaatttgatggaccattttgaatgtgttccaccgtatgtagatattaagaaagttttctatcttgcaattactaagagatattttctgggtggatgtgcttcatttatagttgcaatgtttgttgaggtatggttctttgcatttataacgaatcggatgttgaagaagcaaatgacaaagacaatgtcacagaagactgtggacttgcataggaagtttcagagagccttcattctgcagctcctcatcccattcatcatcgtcttcttaccaatctgttatgtcgggttttcttgtttcgccgagtcagcgttccacaatcaggcattaaacaacatcacaataattataatatcatctcatggattcttctcaacaattgccatgatagctcttcatacaccataccgggagtatacacaacagttattcccgttttgtaaacgtctggacttttcgtcgtccaatcaaactgcaccgcaaagtgtgatggtcactaatatgtga

SEQ ID NO: 490 - DNA, 999 bp, Caenorhabditis elegans
atggcgcctgcctattgcaaccaaaccggctacctacacactgccgattttcaacgattggtgctccatgtcatcagctttatctcgattccgatccacgtgttcggagttttctgtgtatttttcaaaacgccgatatctatgcaatccgtgaagtggagtatgatgaatgttcacttgttcagttgtcttttggatttgggattgagttttttgacgacaccatttgtattttttccgttaatggctggatatccgctgggttttttggagtatctaggtgtggaaacagagcctcaagtctacatgatcatttttatgggagcatacttactggtggccattagtattgtctttgagaaccgcctgtttgtcctcgtaatgaccaacaagaaccttcatcgctacgccactccgatctaccttatccattatataataccactaatagttattccaactgtcatcaaaatccccgatcaggaagagggtaagaagaacttcatcaatttatttgaatgtgtacctccgtatgttgaactgaagaatgtattctatttgatccttgtcaagaaattctttcttataagttgcggaattttcataatggttttgttcttggaagtttggttcttggcatatatgactgatcggaagctaaagcagcagatgacaaagacaatgtcccagaagactgtagacttgcatcgcaagtttcaaagagcattcatcttgcagctcctcatcccattcctgatcgtcttcgttccacttggctacatcgggttcaccgcgatctttgactatcacaatcagtttttcaataacttgacattaattataatatcatctcatggattcttctcaacgattgcaatggtagctcttcatgctccctaccgggaatatacattgaagttatttccattttttaaacgtctgagctcctcgcctacaaacctgactgcaccgcagagtgtaatggtgacgaatatgtga

SEQ ID NO: 491 - DNA, 984 bp, Caenorhabditis elegans
atggacaatgtgagttactgcccaattgactatgagttcacttatctggattctcccgatttctatacatttgcactacatgcggttgctctcatagcaattccaatatacattttacggagtttattgatttttcatttttggacttgttttgtggatattttattcagcattctggtatgcccatttgctgttgcaccactttatgctgggtatccattgggagtgctcaaagaatttggaataggtgtagcgaatcaagctatcctttcaatggcttcaaccgaatctatgatggtatccatactcggtctatatgaaaatcgatatttcatattcaaacgcaacaagaaacgctgggctcttttgcgattcccctggtacgcgttcaattattttttggcagtggcggcgtacttaccggtttattttatggttccggatcagacgaatgcgagaatttttattttagagcaccttccctgcctaacacctgaaatcctgtctggtccaatgttcattgtggcccttgacgtgaatttaatgttacggagtgcctcacttgtttcaacatttatttgcattgaaggattaacgtttttcttcttagtaaaacgatcactgaatcagtatgggacacagttatctaaaaagactgtggaaatgcagaataggttttcgaaagccatcattctgcagctaatcgttccatcactatatcttgccgcgccttttacatatctctggtattctggtagatttaagtacttcaaccagaaattcacaaatctctcatttatttttatatcaacccatggattattcggatcacttttcatgctgtatatccaggttgcttatcgagaagttgtaattaaatttttcgtgaacacattgaaatcgtttggtataaatatagaaagacagtatccacagaagaagtcgagtatttttcaatcaagaatgtctatcaacgtttattga

SEQ ID NO: 492 - DNA, 978 bp, Caenorhabditis elegans
atgcattcctgctcaaacccgtacctggcgagcccggactttctgaaaaccgcgttccatgtcataaccgccatagctactccaattcatgcgttcggattttattgcataatacgaaaaaccccgcaacacatgaatcctgtcaaatggcttttgtttaatttgcactgttggtgtattttattggatgttaccattagctttttgggtattccgtatatactttttccggcaatggctgggtatggtcttgggcccatcgagtccccaggactgtttttctatctgggagtcacttttgttacaggcgttaccacatcgatttttgtaactttcgaaaatcgatatttcattttgtttggtgaatcatcagcatggagatattttcgaaaacctgcagttgttttgagttatattattgtaccgttatactacatgccattacagtttttcatccctgaacaggaatccggaagggaaatttcgtgggcgctgctcgactgtatccccgagctcccaagagatggccgtgagcttttcgttctggccactaatctaaaaggcccgggcctgacaatcttcatatccgagattcttccgatagttcaatgtggtacatttgtcagtcttaatttatataatttaactatagcgagaccaagtggaatgtcgaaaaagactattcaaatgcaacatttattgatttttgcgttgattcttcaggcctcagtgaacacattcctattcatagtacccgtcaacgcagtaatatacatagtatatatccatcaccaaaatcaattgctcaacaatttaattgtattctgcctggcttttcatggtattgtatctactcttatcatgatatttgctcataagccatatcgggacttcacccttctcccagtgaagtacttcaggccgcctcagccgtcagtgtctccaggagttttttccacaagtaacttggcggtttga

SEQ ID NO: 493 - DNA, 1005 bp, Caenorhabditis elegans
atgattgcatgcaacaatcactatttaggaagtcctgattttctgaaaatgacttttcatgttataaccggtttagccaccccgatccatgctttcggcttttactgtattgttaagaaaacaccaattcacatgaaaccggtgaaatggcttttgtttaacatgcactgttggtgcattttgttggatattaccattagttttctgggaattccatacattatatttcctgcaatggccggatggggtcttgggccaatagagtctccaggtctatttttctatttgggggtcacttttataacaggtgttactacatcggtatttgttacttttgaaaaccgattttttctcctatttggtgaacgcaccttttggatacatcttcgaaaatatgcaattgttgcaagttatgttattgtgccattatactatttaccagttcaatttgtcctaccggatcaagagattggaagggaattttcttggacgttgttggaatgcatgcccgaacttcctagtgacggacggcctctatttgtacttgcaacggacattactgccccagccatcggaattggagtctcctgttttgtaccaactgttcaatgtggatcctttctcacacttaacatttataacttgatatttgcaagaccaagtggcatttctaagaggacaattgaaatgcaacacaagcttgttatagcgctaattgtacagtcctccgttacctttgtgctctttattgtccccgtccagtgcatcgtcacatttgtttatttccatcatcagaatcaatttcacaacaatttaattttctttgctcttgccattcatggaatcgcgtcaactctcattatgatatttgcccataaaccatatcgtgattttgtattatctccgatttaccgattcacagagagaacgttaatagttgcggttgcgccatcagtatttccaacaaattctttcagtggagcagcgagaaatcaagcttcttga

SEQ ID NO: 494 - DNA, 987 bp, Caenorhabditis elegans
atgaacttttgcgaaagtaactatctcgctagtcccgagttccttaaaacaacctttcatataatcacgggtatagccactccaattcatgcatttgggttttattgtataatttgcaaaacgccggctcacatgaaatccgtcaaatggttgttgttcaatctacactgttggtgcatttgtcttgatattactttcagtttcctaagtattccgtatattctgctacccgctatcgcagggtatggacttggtccaattgaatctccgggcctgtttttctatttggctatcacttttattactggtgtaaccacatcagtatttgttacttttgagaatcgattcttcatattatttgcccaaaaatcattttggagacatatacggaagtttgcaatagttttcagttatattattgtgccactctacgatttgccaattcaatttttgataccagaacagagcaaaggaagggaactctcgtggaggaagctccaatgtattcctgaacttccaaatgacggccgtgagttgttcgttttcgccactgaacttcttggtccagcgatcacaattattctggcagagtctgtcccaactattcagtgtggaacatttctagcactcaacatttacaacttgatattcgcaaggcgaagtgggatttccaagaagacagttcaaatgcaacacaggctcgtggtcgcttttatcatacagacatcagtgaccctaattctttttgtggtgcctgtcaatgcattcatttcatttatatactttaactatcaaaatcaatttcataacaatttgattgtctttgcatttgcggttcacggaattgcatccacacttatcatggtgtttgttcataggccatatcgagactttgtctattcgccgtttcggcggctttttgaaagtgggcctactgtatacgtgataccggcggtttcgatgtctaaggcacccatagctccttga

SEQ ID NO: 495 - DNA, 978 bp, Caenorhabditis elegans
atgatctcgtgtgaaagtcactacctagccagtcctggttttctaaaattagcgtttcatataataacagccgtggcaactccaatacatgcatttggattttattgtattgtctgtaagacgccagttcatatgaagtccgtcaaatggttgttattcaacttacattgttggtgcatttttcttgatattactatcagttttctgggtattccttatattttgctacctgctatggcaggctatggactaggtcctgttgagtctccgggcttatttttctatctaggagtcacttttatcaccggcgtcaccacggcagtatttgtaacttttgagaacagattccatatattatttggtcaaaactccaagtggaggcatttccgaaagtatgcaatcgttttcagctatattattgtgcctctgtactacttgccaattcaatttctaattcctgagcaagtaacgggacgggaactttcttgggcgatgctcagttgcatcccggagcttcctgatgatggccgggaactgttcgtttttgcaactgaacttattggtccagcaatcacaatgattgtttctgaaagtgttccaagtattcagtgtggaacatttttgactcttaatatttataatttgatatttgcgagacccagtggcatttcaaaaaagacagttcaaatgcaacataggctggtggtcgccttgattatacagacatcctttacactatttcttttcgtggtccctgtcaatgttctcattgcatttgtatactttgactatcagaatcagtttcatagcaatttgatattttttgctcttgcaattcacggtattgcttccacacttattatggtgttcgcccataaaccatatcgagactttgccttttctccgttcgaacgatttttcatagatcacacaactgtagatgtgctccccgtgttttcgacatcaaggactcactaa

SEQ ID NO: 496 - DNA, 957 bp, Caenorhabditis elegans
atgcaagacggtattccgggatatgtcatagttttgcattcgtgcactgctattagtgtcccggtcaaccttttagccatattttgcattacaacacagtcgtcgaatactatgaaacaatacaaatggtatttattgaatgtgcaaatatggatatttctaactgatataattctttttgctctcattgctcctcgattctatttccctctaattgcgggtacaatgcacggaatctttttccatatcggagttccctatgacgttcagacgataataggatttggtacaggagttggaatgctttctgcatgtattcaaactattcaatatcgacacagtaaaatagttccaccgaatagtatactggcaagaagttcgagaatcaaagcctttttgaattttgtcagatatttcttattctgtcaagtttctcttcctgcagttatcacagaacctcgaaatcaaattgaagcgaaaatgagagttgccgagaaatatcaattttatcccgacttcttcttcgatccaaaagtctatcttctccaagaaactccattttttgtatttgttccaggatccgttgttattttttatgtattcattgaactttctttttatattttacaaagttttcatcaactgaacaagaccaattctcacatgtctgaaagaacaaaaatgttgcagaaaaaatattttatttgcatttgtgtacaggttctcattccatttcttttctgcatttttcctatcgggttcttatgttttgcaattgtttctggatatcatgtccaggtttggaatgacatggctgtcatcatgttcggtttacacgggaccgtcgccactttggttatgcttcctctctaccaaccatatcgaaacttttgtaaaagcctattgtgctgtgcgtttcggccgttttctagagttcaatcgttgactgttatgtga

SEQ ID NO: 497 - DNA, 1008 bp, Caenorhabditis elegans
atgcagaactgcatatcaggtgctggaattccagataccagatatttgtcaagtcctaattttatttcatttaccttacactgtctaacatttcttgaaattcccgttctatcatacggtgcttattgcattttgtacaaaactccgagcagaatgaaatctgtgaagttgctcatgttaaacttgcacttttggagttgtttgtcggatcttgtgattagttttgttggtctaccatacattttactgcctgcgcccgctggttatgggcttggacttctggattctccgcaaatattggtttatctgatggtgacatttattgcggccctgaccgcgtcagttctagcaatttacgaaaatcgattttacactttattcgctcagaattcatggtggaaaaaagttcgtaaaccatttttattttcaatctacactctagtacctctcatatttctacctccctattttgatctcccggaacaggaaagtgctcgtcagctggtgttgagcaaaatcccgtgccaacctccatttgattttaagcatcgggaaatttacgtcctggctctggattatgatgttcccgtctattgcattgcatttgggacattggtgttaggtgtctcaataactgttttcggctggctgatttttcatatgttgtggtttggcacactgagctcaagtaactctataagaactttgaatatgcaacgcagatttgcaatttcactaactatacagtcaacttttatgatttcggtggtacttaccccggtattgacaatcctatggatcatcttcaaatggtaccacaaccaaatgttgaacaattttatttttatcacattatcccttcacggagttggatctactattgtcatgatatgtgttcacaggccgtatcgagagttcactttctctaaattatgttatttttctaaaaaatggagggcgtctgttatagagaaaaggagtggcgggactcttaatgttgtgttgtag

SEQ ID NO: 498 - DNA, 990 bp, Caenorhabditis elegans
atgtttctagaatctcccgaagttatgcttgacgttctgcacattatcactacaatttcatgtccgttccaagtgtttggcatctactgtatcctgttcaagaccccaaaaactatggtttcaattaaatggatcctgctgaacttgcacgtatgctgtctgttatttgatttaggactcaccgtactcagtgctccttgtctcatattacctgcaatggctggatttccactgggaattttgtggacaatatttgaagttccaattatatttcaaacatatttgatttttaccagcttgctcatggtatgtaacgcaattcttgttatggtcgaaaaccgatactatcaaatgtttgcgagaaacaaggcatggcatcacttccgtttaccatacatttttctactaactattctcaacatgacttgcgcattaactttatattattatgtgccagatcaaccggcggcgctggaatatgtgtataagcaagtaccaaatattcccgccgagttcaagtctcgtcccatgtttgtgctgtcgattgatattggtgtccccatagccgaattcattttaattatcatatttctgttttctaatggaattatttttatcgcattgatccattggaatatgaactcgtcaactatcaaacaagtgaaatcaacgcaaaccaggaaaatggaaaagaagtttctgctagcgatctatgttcaggcaggtgttgtgatgattgcactcctgtgcccagccacctatgtcatattctcggtattcaacgattactacaaccaagccgctaacaactgtatgttcatttccttcgcatttcacggaatattctcaacacttatccttctatggggatataagccgtaccgaaagttttgcatggatatcatgaagtcaataaaagcctacagagaaaaaacaacattggctgttggaacagcagaagtatctcgattaagaaacgccatggtgtaa

SEQ ID NO: 499 - DNA, 981 bp, Caenorhabditis elegans
atggacaccccaaattttttgtctacttcattacatataatgtcctgcgtagaggtccccgtgcacatttttggagcatattgtattctgtgtaaaactccgattactatgaaatcagtcaagtggtcaatgttaaacttacacttttggagtgtttttcttgacttgacaattagtatattggtgattccatatatattgttcccagcagtagttggtagatccttaggattattggaatttgttaaagttcctcaaaaactccagctttatctcatcgtatccctgtttccaacggtcggagtttcgatcactacacttctcgaaaatcggtactatctgatgtttgcacgcttccggagatggaaatattttcggactccgttccttaccagtttatatctggcgtcagcgttctgctttctaccttcttatttaatgattcctgagcaagaggcagcgctcgcggaagttttagagggaatacccgagctccgcgagtacatcaaagatttcgactttctagttctctcctcagattcttatgggttttttctcactcttatcattttgattaccctggtcactgccacgtcactaacatttgcctggcttcttcacgctaatataagagatcgagcaggaaataatgcttccaagagaacagtgcaactccaacaaatttttttcagagctattttgattcaaacttcaatgccaatttgtgttcttatacttccatgttcctacctcgcattttcaatgttcacgggatactttaaccaagcagccaacaacctgagcttcatcatcacagcgtttcatggaatattttccacggtcgtgatgattatggtgcataagccttatagaattgttgttaatttcaagatatacagaaagttgcaaatattgtggggagttgatagtcaggaacatcgaagcacgttctcgttggcgacaattagcaagtctcactga

SEQ ID NO: 500 - DNA, 1077 bp, Caenorhabditis elegans
atgagctcaaatctttcatatttcaactatttttcaacacctcgatttttgaaccatgcgttcaatttgaccacatgtttacaaatacctattcatatacttggcgcttattgtattttgtgcaaaactccagactctatgaaatctgtaaaatggagcatgttcaacttgcatttttggagtgtgctcttggacttgaaaattacgttcttgatctctccattcgtattattcccagcttttgccgggtttccgttaggtgttttaaagtataccggaatttcaattgatgttcagacatatttgattttgatatcatattcagctctgggaagttccattctgacacttttcgaaaaccgttacttcctaatgtttgccaaacactccagttggcggaactatcgtcatccatttctaataatcaactacataatttcttccgtttacgccatgcctgctttcctcacaattcctgatcagaaacaagctgttgcgaaagttttaaatacacttccaaatgtatcgaaagaaattcgaaatgcaccgatttttgttttagcaacagattttcgattgctagtcataacggtatcacttgtggcggtgttgcttgttggagaatcattattttttgttaaattattattttttaacatgagaaaacggacgagaagaatggcgacatctcagtatactttgaacttgcaacggaaatttttaagagcaatttatatacaggttagtgcaccatttctcctgctctcagccccggtggcttatttgttcactacaatttatttcaacttctatcaccaagtggccaacaatttttgctcacttttacttgcagttcatggctcttcatcgtcaatattcctgatattaattcacaaatcatatcggaaagtcgtatgggatctgctgaagtttgatatcttcacgagaaaaaacaatcaggtgtcaagttttgtcgtctcaagaaactcagttgctatagatcgtcggaaaaagatcgaaaatgattcgagctggaaacgtttaatttctgtattcaatcgaaccattcgagtttga

SEQ ID NO: 501 - DNA, 1005 bp, Caenorhabditis elegans
atgaacttttcctactttgacactccaaagtttctatccacaagtttgcatttcattacctgcatagaaatacctgttcacgtttttggtgtctacatgatactgtgtaatactccggactccatgaaatccgtgaaatggagcatgttcaacttacacgtttggagtgttttcctcgacttgagcattagcctaatgacgtcaccattcgcattgtttccagtgctcgctggatttccgtgtggagttttgaaagaattcgggattcctacgccagcacaaattttcatagttgtggtgctatttgcgttcgtcggagtcgccatactcggcattttcgaaaaccggttctacatcatgtttgctgaaaatactttctggaaatttgtaagagtttcctatttcgctttcaactacattctggcattattattttttattcctccatatctgcgtataccggatcaagacctggcgttacagcaaatttacaaggagctcccatcaaatctcccaaattggattacaaaagcagacgtatttgttctagcaaccgacataacctattcattattatcagtgttcctcgttgtgatattcattatatcagagatcttgttcttcatattctacgtcaaaattcaaatgaaatgcttggctagaacgttgaaactgtccaagaccactttgaagatgcaacagaagtttctggatgccattcattttcagatgtacaccccattgataattctggtaatcccattagcatacatcggatacgctatatattttgatttctacaaccaagctgcaaacaacatttctttcataattatcacttttcatgggcttgcctcgactattattatgctactgatacacaaaccgtatcgggaagtttgtgtgaacatgttctgcttcaaaattctgaacaaaactactccagccggacatacgaggctcaatagtcttgtgacaattttgccggtgcgatcaagaatttaa

SEQ ID NO: 502 - DNA, 972 bp, Caenorhabditis elegans
atgaattattcctcgtaccttgataccgcagattttcaagcattagctctccatattatgattggtatagaaattccagtgcattttcttggtttttattgcatattattccgtactccaatctctatgaaagctgtcaaatggggaatgttaaacctccacatttggagtataggactcgatttgggtgtcagtttgttaacagtaccatacattttatatccagcacttgctggcgtaactttagggatcttgagcaaatttggatttccagtgtcatatcaaacatatctattgggagttttgattggacttcttggcgtttcaatcgtgtcaattctcgaaaatcgttattatcttttgtttgctcgtgaacattggtggcgccatgttcgtctaccttttctgatatttaactacatagcagcttgttcatattttactccggcctattattatattccggaacaaacagaagcattgcagaacgtttttaagatgctcccagaactcccacaagaaatttacgatgctccagtatttgtcctagcaacagattttcgatacgtggtattcccggtctgttttatgacaaccctaatggttgccgaatcagctacttttatcattttaatctatggaaatatggctgaacgaaacaagaaactttccttatctcgtcatactatgaaaatgcagacaacttttcttcgttgccttaatattcaaacttctatcccattattaattctacttctgccaatgggctatcttgtgatttctcgaatcttcaaaatttattgccaatctgcaaataatttgtgttttatcataattgccgctcatggattattctcaacttttataatgctttatattcattctccatatcgagaagcttgcttcagaatattttgttcaaaaataacacgctattcatcaagattttcaacagtgtcaacagtcttgtga

SEQ ID NO: 503 - DNA, 999 bp, Caenorhabditis elegans
atgtgtatgaacacttcattcgccaaatttctggacactccacaattcctatcaacaactatgtatacaattacaataattggtcttcccgttcacatattcggcggattatgtgtagtttttaagacaccgactcaaatgtgtaatatgaaatggccaatgttaaccttattactatggagtgcttctttagatttaagctttgggtttttagttattccatttatgtatcaacctgttctagctgggtattctcttggaattttaaatggtttcggtgttcctttaagggttatgtactacatttgtgtcgtgcaaattgcaggagtcaccgtatccgtgtgcgcccttttcgagacccgcttcttcattctctacgccaaacaaagctgctggaagcacctacgtcggccctggctgatcctcaactacacaatctgcgttgtttacatgattcctacttatctatcaattcctgatcagaaaactggaaaagcctatcaattctcgaaatatccatgtcttccccaagaggtttacgatgagaaagtgtttttattgactacctggagcactggttacgcgtataatatgagcctgaacaccgctgtacaacaaacgctgatttttgtgtttttgatttattggaatatgcgaaagtcgatggtcgaggtgaaaatgtcaaaaaggacattggatatgcataggacttttttgaagactataatattgcaggtaacaatcccccttatcacagtgatgggtccgctgatgctcaatttcttcacaatttacaattcctactacaatcagggagccaataatctatcaatttccatgatggccacccatggattagtgtcttcacttgcaatgatctacctccataagtcttattgggcgacacttttgcagattttgtcacccaagttcatatttgaagatcgagagacaatgatgttctcgagggttcatcagcatcctcagcagttttcataa

SEQ ID NO: 504 - DNA, 1008 bp, Caenorhabditis elegans
atggtcgacttctcatttctcaacgagccctactatttctcaatgtgcctctacgttgtcggagccctctctttcccgcttcatctttttgcggcctactgtattttattccaatccccggcaactatgaaacatgtgaaatgggtcatgtttaatttgcatttctggaattcgtatctcgatttgactatcagtacattcagtcagccgttcattattccaccggttttcggtggattctttctgggatttttcagcaagattggggtaaatataagcttgcaagtttatataatggttacattactgatgatggtcgccgtcgccacaactgcaattttcgagaaccgtttctacataatgtttgccgatcatacatggtggagttggggacgtgtgttcttctacctcatcaattattctctggcgcttttgtactttgtgcctaccgtaatccaaattccagatcaaaccgttgcgagattagcgatattcgagttgtacccccaggtccgtcactttgacaccccggagcatgagatttttgtggtggcctatgatatggaagtccgagagtacatcgggtatcggcagctaataagcttaggtgttataattatacaaggtcttgcatttttgataattctgcattgcaatatttcaatgtccaccagaaatatgacaatatcaaaaaccactttaaagatgcaaaggatgtttttgaatgcagtatacatgcagatcgcgatccctgcaatcatcatgatagttcctcaaattatactgaacgttctcggctacctgtacatgaacagcccagaaatgaacagtcttgcatacatgttcatgtcgattcatggagcatctgcatcggttatcatgctctacttccatgctccataccaggaattctgcgcaaaactgttctgcaggagattccacagcaagcctaaaattgaagtcaactttctcaattcgtctggaacagaaggaattacgccgttgtga

SEQ ID NO: 505 - DNA, 1011 bp, Caenorhabditis elegans
atgaattcatcattcctcaatgaaccctactacttctcgctttgcctttacacaataggcatgttctcttttccaattcacctattcggtgcctactgtatcttatttcgtacttcaattgcaatgaaacatgtcaaatgggtcatgtttaacttgcatttttggaattcctggatggacttgacgatcagtgttttgagtcaaccgttcattattccaccagtatttggtggctattttttggggatttttagtaaaattggaatggatagagacttgcaagtgtatattatggtaacacttctgatgatggttgccgtctcaacaatttctatattcgagaaccgtttctacatcctttttgccgagtacacgtggtggcggtatggacgtattgtcttctacatcatcaactattctcttgcacttttgtattttgtacctaccgtaattcaaattcctgatcaaaatctcgctcgccaggaaatcttcaaaatgtaccctcaggtccgtcactttgacaccactgaacatgagatatatgttgtcgcgtatgatatgggcatccgagaatacattgggtaccggcaggtgataagtttgggaaccgtgacagtggagggattagtgtttttaattctatcacattatcatatttacgtctccactaaaaatatgaaagtatccacaactatgaagatgcagaaaatcttcttgaaagctttatacatgcagatagcaatccctgcaatcattatggtagttccacagattgttctgaatgtgctgggttacctttacatgaatagccccgaaatgaatagtctcgcgtatatgctcatgtcagttcacggagcatctgcaacacttatcatgctttactgtcatgctccatatcacgatttctgtgccaagttgttttgtaacagactatgttttaacaagctcaaggttgaagtgaactttgtcgaaacgacggggtctgcggatgtgcatcggataactttgtaa

SEQ ID NO: 506 - DNA, 993 bp, Caenorhabditis elegans
atggaaggcgaatcatttttcgcgagcgctcaattcttctccctaaccttgtacacaattggattcttctcctttccaattcacctattcggtgcctattgcattttgttccaaactcccgaatctatgaaatctgtaaaatggagcatgttcaatttgcatttctggagttcctgtctagatatgacagttagtttgttgactcaaccttatctattgaagtccacttggtccgggattccatatgggattttgaaggagttcaatgtcccattatcgtttcaatcgtacatggtttctaccctgttttgtatggtcgccgtctcaatcatcacaattttcgaaaaccgcttcttccttctattcgccgagcactcttggtggcggtttgctcgtcggcctttcctagccatcaactacattctcgggctgctctactacgtcccaactgtgctcagtgtccccgaacaaaccagtgcccgagctgcaactttcaaggaattccccgaatttcggcagttagataccccggaaaacccgatctatgtactggttttgaacaatccatgggtttcggtgcggcaaattgctatggaagcgactgttgtgatagagacgggaattatagtttgtctgttgaaatttaaaatgaaaaacgttgtgaaagaaatgaaaatgtccgagagcacagcgaaactacaaaaggcttttttgaaggctctgtatattcaggtctccctaccacttcttgtaattctcctaccatctgctgtatcagtattttctggaatcttaggcatctcaactcaaagtgtcaataacctagtgtatattacattctcctgccatggattgacctcaaccatcgtgatgctgatcattcaaaatccgtatcgagagttttgtttagtaatggtcggaaagtcgcaccggcgacagaaaatttctgccacatcgacaattagcgggagaagtgtagtgactactttttga

SEQ ID NO: 507 - DNA, 823 bp, Caenorhabditis elegans
atggaaggtgaatcatttttcgccgcatttctggtgttcatgtctagatttagccgtcagtttgttaactcaaccgtatctactgaagtctacttggtctgcaataccatatgggattttgaaggagtttcatgtcccattaacacttcaagcgtacatggttaccaccttggtcgctgtttcaatcatcaccatcttcgaaaaccgttacttccttctattcgccgaacacacttggtggcggtttgctcgtcgaccattccttgccatcaactacattctcgccattctctaccacgtcccaaccgtgctcggcgcgccggagcaaaacagtgcccgagctgcaactttcaaagaattccccgaatttcggcagttagattccccggaaaacccgatttatgtactggttttgaataacccatgggtttcgtatagacagattgcaatggaagtgacagttgtaacagagggcttgactatagctttcctgctaaaatataaaatgaaaaacggagtgaaagaggtgaaaatgtcggagaccactgcaaggttgcaaaaagcttttttaaaagctttatatattcaggtcttactaccgttcatggtgattctggttccatctatatcccttttttccttttaaaaatctcaactcaaagtgttaataacctggtgtacattacgctttcctgtctaccattgtgatgctattaattcaaaaaccctactgagaattttgtttagtattggtcggaaatcggcgacagaaatcactgccatatcgacaattagtcgaagatctgttgtgactgctttttaa

SEQ ID NO: 508 - DNA, 930 bp, Caenorhabditis elegans
atgttcttgaaattttttggctcgattcccgtttactcaacaattcagtactcgatagctgtgatatcactaccagttcaactatttggcgtatactgtattatcgcaaagactccaccgacaatgtgttctacaaaacttcatctgctaaattttctgatgtggtctatggcatatgatatgattatgacctgtgtgggtcaaccataccttttctctactacaatggccggaattcctttagggtttttacacatgataggtatagggacgggagctcaaatttattttggaatgactattgcagcattttgtgcaatatccacagttcagttattcgagaaccgcttcttcgtgctcttcgcagagaaaacttggtggcggcatgtcagatacccgttcaaagtgttcaacatcacctttggagtggcattttatcttccaacttattatgctatgcctgaccaatatcttccaaggcaacaattatttatggtacatcctgagcttattcaatttgattcgcctgaaaatcctatattcgttatggctctcgattttccgtggatcccagtgtactctcaaagagtttttacgataattataattattgaaatgatagtgttcggaacattgctacaagtgaatatgaactgggcagtaagaaaaatgatcgtgtccaataaaactttacaactacaacgggatttcgtgaaatccataaaattacagattttaataccactactattcgtagttctaccttctgcttggttggctataatgggagcatataacatttccgaccaaggcagtggaaatttagcacgtaatataatctccctacatggtgtttcatctaccgttttgatgatttatcttcaaaaaccgtaccgacaatattttaaacagatctttaatttcaagtga

SEQ ID NO: 509 - DNA, 771 bp, Caenorhabditis elegans
atgcttcccatcagctacccggatgtctactccaacattctctatgcaatatctggattttcaattccaattcatttatttggagtggtcccggtttccataatctccatgttcgaaaatcgctacttcatcttatttgtcgaaaatcgccccagacgatgttggcgatatcttcgttatccattccttattatcaactacctttttggaataacctactttattccaattttcttgaatgtacctagtgatcaggagaatgccaggcgcattctattcaatatgtatccagatgcttgcgaatacgtctctgacaagaatctggtatttgtggtggatattggtgacattgcttggtcaaagatacgagaaaatgctctcacatttttgcttctttcggagattatagtgttggcagtggtgcttagagtgaaaatgagtcgggcattgaaaacagcgattagtggtgacacactacgaatgcagaagaaattcttacgagcgttgaatatacagatcgcaattccgatactcttgttctttgcccccgccgcaactggaatcctaacaagccagcagacgtccaatgagcaattggagcacaacttgtttgtcatcacaacgtcattccatggagttctatccacaattcttatgatctatttgcaaaagtgttatagagatgtatttatcgggctttttgggtgtcgtaagcctgatcttgctatcaatacagtagtcttaccatcaattagatttagtattgcgtga

SEQ ID NO: 510 - DNA, 1023 bp, Caenorhabditis elegans
atgaatttgatcaatgctaattcttcggatttaaagaatatctattccacttatattactatcctaaattttattccgatagtcacagttccaatttatgcggaagcaatttactgtattattaagagaagtccacaatttcaaaaactttatacatgtattctaactgcacatattctcggatgtcttgttgaagagttctacgggtttcaactattccgcccaatggtgttcgttcccgtgattggagtttatgcagatggcattctctcctggctgggagttcatcctttcatacagctatacgggatgatgctctctgtccaaatcaatttgggaattcttacacatatcacattttatcgaatgaaaataattatcccaatgtcgtttcgatactatacaagatgtattcagtttggaattttgagtactgtagcgatgtatactggcgcagtgttaacagtcaatattctttttttcacaatagaaaatcaacaaaatgcaaagagtttttatgcgaattccaacaccattccagatatgctatggtctgagaagtatatagtatcatctccaagaaacccctattacaactcttttctaattggtgcggctatgtgtataggattttatatattactttgcattattattccttcgatatgttatgctgtcctgcatcgaaccaaagactcattatcagaaaaagtgataaaggctcagagagcgtacttgcgcactatattactgcaggtcttggttatggttgtatgtgttataatgccgttttccgtcttttttgcaggagcagcaaatttgattacggatccaaggataatcccagcatctcttatattcggcttatgtcatggagcagctaccacgctagttcacctgttatccaacaagccatttcgcagcacgatgaaagcacagctgttatgggtcataaactgtgtgacgtgttctcgacactcatcaagcaacaaagtgcatacactgtcttcaattgttcaataa

SEQ ID NO: 511 - DNA, 1002 bp, Caenorhabditis elegans
atgaccagttcgatttggaacgaaaatccaacattttacatttggacccgtcaactcatttttgggcttctcacttttttatatcctttgattttttatctggttttgtgcaggactcccaaacaatttgggaacttgaagtggtttctgagttttcatatttttgcaataacctgtcaatggctgtgcagtttcttactaatcgatttctacacattcgtcccatcaaaaatcactcgaatcgacggattattaattgattttatcgatgcaaaagtgctctacacttccatgtatattttatctgccttgtcaacttcctcttgtcttctactgttttgtaactcggtgttcaacattttcaacatgttaagaaacaacaaatcttggttgagaacattctcagaatggttggcttggacttttgtgttgatgttcccatttatgtcacttctcggtttcacaatacgtgatcagccaaatgtgaaagctttgaccaaacagatctcttcatattaccccgactgcattgacaaccctaacgtaatagtacccatattgccggatgcggaaggtcagaaaaaatcactcgtattctttctaatgtatctatttacaatggcaaccgccagcatattgtctgcccagcttatttcacacttgctctcaaaacgaatgacaaatcagtcggacaaaaccaaaaagatgcaccaaaaattcaaccgtcgaagtctgtttcaagtgttaattgatatttccttcacctcatttccatatattatttcaaactttgcaacgctttttcagtggagagttcctgaacttacgtactttgtggattttatgtcgaaaagtggctcaacagcttgtatttttgtgatttttatgtattatgatccctatcggaaatggttacaagagattgttgctcggaaaagtacacagacatccgtgagacatgtgaccattgctgtgatggatagaggtggcaatgagccgtga

SEQ ID NO: 512 - DNA, 1005 bp, Caenorhabditis elegans
atgaacatttcacattcaatttggaatgagaatcctgttatctatgtggttgtgaaacgaatttgggcgttactggccggaatcatttatccatttgctcatttttgtgtgcttacaaagtccccgaaaaagtgtggatacttgaaatgggtggtatacctgcactgcttttggataacttgtgaatggctctccggctcatttctcatcgacattttcgacttccagccatccgtcactatccgagtcgacggtttgctgaacaacgtattggatccagttttgctatataccatctacatatgcgttgattctttatcatccacgtccgctctaattctattcaccagtcgcattttcatgataatgaacatgtaccgtcaatatttgtcgcatttacggattttctgcgagctcatgatctacgtgctagtggtcatttttggactctggacgattccgacggctatttggagcatccctgatcaaacatcagaaaagcttaaaatttctcaagatggtcaaccctacccggactgtctttgggacgacaatgtcgtagcggtttttgacagtgggtctcaaagtgagcacctcgtatcgattctgacaattttaaattgggtctcgtgtggaatagcgatatttgttgccgcgaaaattgcatttttcctacttgcgaaaaggatggtgaacgagtcgaaagccacaaggcggatgaacaaaaagttcaatcagagaactattcttcaggcattcatctttttattcttctcgtgtgtcccttttacagtactgcatctcactataatatttggtctttacataccaggaatcacttatttcatagatattttctctgaaaatcacccaaccgcttgtgtagtcgccttatttctgttttatgatccttatcagatttacctattcaaaattattggatggaatccgaaacatatgtctaagacatcaaccagtgccacgtttgttgtgttgaggaattag

SEQ ID NO: 513 - DNA, 1038 bp, Caenorhabditis elegans
atgaagaatgtgtctcattcgatatggaacgagaatcctgaaacatatttcactgtaaaaacgatttatgcgatttttgtgacacctatctacccgcttgctcattattgtgtgctcaccaagtcaccaaagagttttggaattttgaaatggattatttatgttcattgtatttgcttcacttgcgaatggttgggcaacgtgttcctaatcgacgtttatgattttcaaccgtcaatacttgtcaaaatcaatggagtcttgaaaaattacatacgcccattaaacctttataaggtttacgtgatagtcgaaggaataactgaaacatctggactgattttatttactagccgtgttctcctcatcgttgacctctacagaccccatccatcaattcaaagaaaaatctgcgaatttttgatctactgcgttgttttttcgtttggcatgtgggccatcccaatgatagtttggcagctgccaaatcaacattctgcaaaattggaagtgattcagaatcacgaggcctatccagattctatttgggactcgaacgttgttgttattacactagcggattctgttgtagacaatacgatttgtgctttgattgttgttaactgcgtgtccattggtttcgcgatctttgtgtctgccaaaatagcgttctacatgttatcacaaagaatgataaatcaatcaaaagcaacaatgaaaatgcacaagaaattcaatgaacggaccattttgcaatcaatactctacttcactttttgctgtgtgccattttctgtactctatatcactattatcctgaatattcacatagcaggaagctcatatttcatagatatcttttctgaaaatcatccgacagcatgtgctgtgtcattatttttgttttatgatccatatcagtactatctaatagacttgcttggctggagaaaacgcaagaatgtcaccaatgcgtcggctatttttgtggaaaaagttaacacggtttcaaggaattcaaatgtagctttttcgtga

SEQ ID NO: 514 - DNA, 1014 bp, Caenorhabditis elegans
atgtccttgaattttagttcatgtttaatagagacatattttgatacacatgattttttgggtttatattctcatcttatttcaattattgctattcctgttaatgttttgggaatttggttaattttttacaaaacaccaatacgaatgaaaaatatgaaaggtgtcatgttgaactgtcatgtctggggtcttgttggtgattttatgcttggaacgctcaccattccatatgtatttttcccagttatagccggaactccactcggaattctcacgcggttttttgatatcaatgcattttttcaaacgtatctcgctgttgcatgtattgctgaagttggatcttcaatagtttttatgtttgaaaatcggcagaatcaaacagttacttcaaattggaaaatatcatctgcaactggaagaaaatcatttgtttctatcaatttggtgtttccctgggtagcttcaacaatttctttgcttcgtattccaaatcaaacttgggcaaaacttgaacttctaaagacaattccatgtccaagtgcagaattctttcaacttcccataattatagtgactacggaggcaaaatcaattggtttagcactacttgctcttgtattgttttatgcaattcaaattctagtatttataattcactcttcactctatctttgcatttcaacaaaatcgttctcaatgtctgaaaagacaaaaaagttgaaaagaaaatattttatagcagtttgtgttcaagtattcatcccttttgtaattatggcagttccagtaaactactactcattttctattatcaccgactactataatcaatcagccaacaatttttgctttttaattatgagtcttcatgggttcttctccacaattgctacaattgcaatttatgaaaattatcggaattacattcttcacattctacggattaaacgcaacattaaagttactttgattcagacaaaaagcatggcggaaacaacctatatttag

SEQ ID NO: 515 - DNA, 1056 bp, Caenorhabditis elegans
atgacaacgactacacaattatttgaatactatgctacaaactacagccaaatttgtcaaaaattgagctatgagagaagctacatcgaaacgcctgaatttttatcactgtgcgcaaagattattggaatattgggtgttccaaccaatttcttcgcaagctatattataacttttcatactccaaaatcaatgacccatttgaaattgtgcctattgaatctgaaattctggacacttctaatagacttaatctacacagtattcttaattccttttgtgttttatccgatatttgccatgggatacattggaatatttggaaaggtttttggaataccatccgaaattcaattttattttgcaatggcatgttatggaggcatagcatcagcaggcatattaatatttgaaaatcgacaacatcacatgattccgaaaggtcacaaattccgaattcaaaactgtgcatttagagttttactgatcattttcaatgttctcataggaagttctgtaatgctaatggcaatttggttgagagcagatagcaacgagcttaagtttaagtttttgaagataaacccatgtccggaccctttgtatttcactccatcaacatttgccgtggattcacaaagaaacgagtttagcatttgcattgtgattgttttaactgtggttttcatccagtacacatttttcatttctcattgtatttggtacatatattctgaagacgccgtccgatattcgaagagtaccaggaaacttcaaaaaatgtttctctacgcttcattttctcagcttggaatttttgtgaccgtattcgttctcccactgggaatatttgcaatggttttgacaactggatataagaatcaaggactcctcaatatttgcaatttgataattccaacgataggaatgaatacatcaattggtttagtgacaatgtacaaaccatatcgagattatttcattggaatttttaaagaaggcggaaatggaattgttcctccgccaagcgctttcactaaatctgtggttttttga

SEQ ID NO: 516 - DNA, 1023 bp, Caenorhabditis elegans
atgaatgaatattacactacaaactacacaaaatgtaactcatcttttacaatattcgcaactccagaatttctatcaataagttccaaaatagagttctcaattattttgcccattaattttttgggattttattgcattatttttcattctcctaaatatatgaccacgttcaaatggcatttatttcatctacaattttggttcttaatgctaacaactttctattcgcttctcactacgccatttcaattctatcctgcacaagttcgatgttatattggattattcaagtatcttgacataagttctcaatatcaaatgtgtattgttcattttgtatacagtggaattgcaactgcagcaattgcactttttgagaatcgtcataaacacttggtcccctcaacagatgtgttttatcaaataagggatcaacacaggatattgatcggcattttcaattttttcgcgggggctacaaattcaattcctgtattgcttcaggaagagtcacaagagcttttaaaattgaaatacttagaaatacttccatgtccaatagatttgtatttcaattcatgttcattcgcggtagtcaaacaatttgacatttggagtggtttggcttatttcacaaatattatgatagccattgaaattattttcctgattgttcacagttttatatatcttcgcaaaagtcagatggtttccacgttttctgtccgaacaaaacaactacaaaaagctttctttaaagccgcacttgctcaggcttcatctccgattcttgtactcgcagttcctgtatttttagttgcatatgtgaattcaaccagatactatttacaaggattaatcaatgtttgcattttatttatatcggcaaatagtgctatatcaacattttctcttctgctgttcaattctccatacagaatattctttaaaaatctgttaatttcgcgatctacaccagatatatttaacagtagagttgcagtgatttcaagtttatag

SEQ ID NO: 517 - DNA, 1029 bp, Caenorhabditis elegans
atgcctatcgaagttggtccggactggtatatttatggtatgcatttttcggcaatgatcacaacaccagtcaacatttttggagtttacgttattttattttgtcaaacaaaacaactggcctcttatcggtggcatttgctagtttttcaggtttgctcgatgacatccgattttttgctcaacattggcatgcttccagtgatcttttcaccgtttccaatgggagttactcatgggattttcacgcggatatttgaattatttgggtctgaaataagtacagaggctcagtgtattatggtaattgtctcactcttcgttaccgccggaagtgttgaacttctatttttcctccgttatcaagctattcttcccgccagccattcgaataaacttacaactgtattttctgttatcattattttaatatggcaaatctttctgattacactgatgcttctcatgttcaagttggcaatacccgatcaaaaaactgctagagcacagtttatcgagctttacccggatctccagtatctagtggctagtaagcatgtgttcatagtatgcgtagttgtcgaaactattcatgtcatattcttatgcctgtgcgtttttcgaatcggaattggtggcacaattgcaatagtgctcatttggatgtcaagtagagctttgaaatctgttcagctatcgccaaccactcggaggatacatttgcagttgataaggagtttgtgttatcagatagctgtgccaattttagcattctacatacctatcataagtttggttgttcctttgatatttactattcccaactcgcaaacgtcgtacttcatttctctactttgcatgtctacgcatacttttttgggtacattaagcatgttatacttcaatcgtcattatcgtcaatggttgtgcagcattatcagatctcggaaatttagcacttctttgccaacgtctaagataattgtagctcgggaaagattgaactcatatcgacctgcagttatataa

SEQ ID NO: 518 - DNA, 1044 bp, Caenorhabditis elegans
atgcagatcgatatgtcaccagactggtatttttatgcgatgcatttctccgcaatcgttactactccagttaatatttcaggaattatgattattttattctgtcaaacaaggcaattatcgtcattgcgatggcatttgctagtttttcagattttctccatgattagcgacttttccctgaacgtcggcacattacctgtaatattttcgccgtttccaattggcagaccacatggggtttatacgttgatttttcaaaaattcgggttcgaaacaagtacggaggcacaatgtatccttgtgttcgtgtcaatctacctcacagctggaagcgtcgagttcttattcctacttcgctatcaagctattcttccttccggccaccctcacaagctttcaacttttatctcagttctattactctccatatggcaagtattcctgatcacaatgatgttaataagcttcaaacttgccgtacccgaccaacaagttgctcgagctctttttgcacaattacacccggaacttcagtacctaatgaccgatgagcacgtgttcattgtgtgcgttgttgttgagctgattcacgtcatatttttattctcgtgcttcttccggctaggaattggaatggttactgtaatagtgctgatttggatgtcgagtagatcattgaaatctatacaaatttcacttacaacaaaaagaatgcatctacagctgatcaaaagtttgtgccagcagataatagttccaattttggcattctacattcccataatagtagtggttgttccactgatgttgagtataccaaatagtcaattgtcattcttcatttcgctcatctgcttatcatatcacacattttttggaacgttgagcatgctttacttcaaccctcattatcgtcaatgggtgatttcagctgtgagaaatcggccaatgaacacgtctacggcgctcacttcaaagtttgtattggcgagagaaagatccaatttcaatgcgggtcgaaatgtgtcagcggtcatataa

SEQ ID NO: 519 - DNA, 1032 bp, Caenorhabditis elegans
atgccagctccctgcccagcgaccattccagacggctatttattaactttagacattattggaggaggttcgctttcaatgaattttctagcgatgtatatgatttggttccagtcgcctggcatgcatggttataaatattgccttacttatatgcagttcgcctccttcctagtggaattcaatctaactgtgctggtcccggcctattattttttcccactgacaggcggaatcgcggttggagaagttgtccgtaaatacattagcaatcatatgggccttaccatatggatgtttatgttctgtttcgtacttccggctagtctatcgtgttttatctataggcatactgcagcttcacaaattcagaataacgcaagtaaatttcatctcaaaaagcttgtgatgatattaactcacatttttccatttctcactgcacttggcacctggaattgtcaaatgacttttgatcagaaatatgaatatgtgcggaaaaattatcctcaatgcctgttttggttagagtttgacaggtttgaggcatatgactatcaggtgaacccatggattgtccggactgcatgtgcggcgattggatttttaatgataagtacatgctacggaatatggcttggcgtccatacaatggttatcctccaacgcctccgcggacacatgtcagtgcagacctaccagatgcacctaaccgctttaataagcttgggactgcaaatggccacccccacggtatttattcttcccgtttatatgttcgtagcagtgattgtcactgacgctgttgacatgcaaagaatagtatcctgggcgccatgtctaatgtcaacacattcaatgttgctagtcactgtgatgataatgagcaatgcgtcttaccgcaaagttttgaaagataagatatggaatgtgttaggactaacgaggcttactgggagtcacattggaagtgaagtggagccgagtattaggacctctaacaatttaattggctcccgtccggtttcgtaa

SEQ ID NO: 520 - DNA, 1038 bp, Caenorhabditis elegans
atgccggcaccatgtcctgaaacattgcctgcctattatatgcctaccttacatgtaattggtgcaatttcgattccaatgaatgttttgggattttatatggtttggtttcagtccccaggaatgcagggctataagtattgtctttgttacatgcagagtgtctcaatgctcacggagctctacatgtcctggatatgcccctcatacttctttttcccattggccggtggctatatcctggaggagaactttcgaagattcgtgagcacacacgcgagcttgaccatttgggttttcattttttgcttcgttttgtcggctgctctgacatgttttgtataccgacataatgctgcagcacaaattaatcaggactactcgggaaagatgtatttcgaaaaactcctgctagttttgacgcacattttcccatttttcactggttttggcacatggatgtcgcaattgacttacgagcaaaaatatgactatgttaggcagaattacccccaatgcttgagctggatggcttatgatggctttgaagcttataactggcaagtgaacacgtggattccagtggcagggctcggaggaattggttgggtctttgtggttgcaagctactgtttataccttggcgtacacactatgatgattctccaacgtttacgtgctcacatgtccccccaaacctaccaaatgcacagaacagccctcataagcctgaccatgcaaatggtgatccccggaatgcttctaacaacccctttgtacatgattctagtagtaattatgacaaattcattggcttttgaagagctggcctccaccttctccttcctaatgtcctcccactcaatgtgtcagtgttttgtaatggttatgagcaatggggtataccgacgggtacttaaggagaaggttttcagattgttaagacttccagttccaaatgagagtcaggtggggagcctcgttgagccaagcatgagaatttcgaataattttgtgggaactgtactaaatgcttaa

SEQ ID NO: 521 - DNA, 1068 bp, Caenorhabditis elegans
atgatcatgttcacagaagctgaagttatgagtttttcatacgccgttgattttggagttcccgaatggctcaaactttactatcacgtcatttccgtggtgtcaactgttatttcatttttctcaatgtacataattttgtttcaaagtgggaaaatggatggatatcgattctatctattttatatgcagtttgctggatggttgatggatcttcatctatctacttttatgcagttcattccattattcccagtttttggaggatattgtactggactcttgactcaaattttcagaattgacgattcatttcaaacgacatatactgcatttaccatttgcttggtagccagtgctttgaatagttgctttgttcggaagcatcaagcaatttctaaaatcagctctaaatatcttctcgataatgttacatactgcattgttatatttctactcaatatatatccagttattgctgcatctttactttatttgagcatgctcaataagtccgaacaagttgaattggtgaaatcggtttacccaaatctcgttgataaatttgcaagtctaccaaactacgtggtatttgattccaatatatgggcaattgtattctttgcattcatattttttggttgtacatatacacttgttttgattgtcacaactacttatcaaatgttcaaaatattagacgataatcgaaaacatatcagtgcttcaaactatgcaaagcatcgagccactttgagaagtcttttagctcagtttacaacgtgtttcttgattgttggtccagcgtctttgttctctttactggtagttataagatatgaacatagtcaagtagcaacacattggaccattgttgctctaactctccattccagtgcaaatgcaattgtaatggttatcacatatcctccatacagacattttgtaatgctatggaaaacgaacagatcattccacttcgcatcatctcaatatcaacggtctactctcccgaatacaagaattcaaacggagcgaagtattgcagtaacaataacaacccattaa

SEQ ID NO: 522 - DNA, 948 bp, Caenorhabditis elegans
atgtccctcaacatatcgtttgagacgccaaaatggcttgtaacttgttatcattcatccacaataatttcggtatttatcaacaccttgggaatctacctgataaaatctcaaagtggagcaattgacagcttcagatattatttgctatggttcacgatctgcagtctttcttccgacatttgcctgttcttccttgtccagcctatcccattgcttccaatttgggctggctacataaatggcccattgtggtctgtattcgggataagtacccatatgacttctttagttgggagtattgcaattggagaacaagctgcagcgttaacaatgtgttttgtgagaaagtatcaggctctgtcgaggattcggaatgaggtgtcaaaaagttcaataatctttgtttggattttcacccagattgtgattgctgtttgggtgactttttattattttaccggtatggatagatcaacttcattgaatattattgcgaagaactaccccactctttacccgaaattcctagaacttgaagattttcaactgtatgtccgaaacgagattaccacctgttttcttatatctgctggttttatggcttcaatatttattgcaatcattatttattccactgttagaatgattaatatactgaaaaatctagaaaaacacgtatccgcggtcaactttaaaaaacacaaggcagcagtgggaagtcttattgctcagtttttaacaactcctatagcgtttgtgccacctgtggcgagtggagttttactatgttttgattttcagcatattcaagtgactaattgggctatgctagccttagcctcctgccatggaaccgtcaactgtctggtaatgattttgacctgcccaccatatcgaggatatttaaaacggcatgttttggcggcttttcggcaaaatagttaa

SEQ ID NO: 523 - DNA, 972 bp, Caenorhabditis elegans
atggatttgaatattgactttgaagtaccaaattttctgatccatcattattacgcatcgggatcaatttcagttttattgaatggattagtcatctatcttttgatatttcataatgggaaaatcggttctttcaagttttatttgctgagtttccagatttcatgtgtcttgctagatctccacgtaacaatgctaatgcaaccagttggattgttgccaatttgtgcggggtacagtaatggaatattgtccaaagtgttcaagctgcactctcatatacttatgacgctcttcgtcttcttccttagccttcaaatcaacaccttgattatttgctttttacgaaaacacaaggcaattatgaatctgaggagtacttcttcagttccaaattggatttatcatgtcctgttaggcatgatcgtcttcctgatatggtcattaacattcactttgagcatgagcagtgagagctatgaaaagcaattggaaatgcttgacatttttcaccccctcgtctctacaaagttcagaaacctacccgagtttcaatactactacctgaacacttggatgttgatttttttcaccctcacaatttttgaaactatgaaatcatttttgatggtgtctggaactgtgactcaaatgtatcgagcactgaaagaagttgaatgtcagctgtcaagtcaaacacttgctaagcataaatctgcattgagaagcttgattgctcagtttgcaacaactcccgtcgcaatactacctggcggaatgatcgcgtgtactgtaatatttccaacggaatactcccaaaaaatatcctggtgttgcatgatggttatgaccacccactcaactctcaactcactggtcgttattttgacatacccggaattccgaaaaattgtatgcttttgggataaatcggtcaaaaaatcaacagcggtggctacagtgatcatttaa

SEQ ID NO: 524 - DNA, 1008 bp, Caenorhabditis elegans
atgtccaacccgttgaatatcgattttgaagttcccttccacatgatctaccacttctacaccactggcactatcgccgtgtgtcttaatattctggttatctacctgatattgttccatagtggaaaactagactctttcaggttttatttgttggcttttcagatagcgtgtacatcttccgacgtgaatattgcgttcctcattcagcctgtcgggttatttccgatttgtggagggtatggctatgggatcctggcacgatggttccactggagctctcatactcttatgacactgttcacattattcataagcattcaaattcaagtgctgacaatttgcttcctacgaaagcacgaggccattatgaaccttaaatctactgtgaaatccaataattactggatttacatactaacctacatattttgcctatcattctcctgccttatatctttctcaattttcatcgcagacgctaccaaggaagatcagtataaggaactgcaggagcactacccggagtacgtggacaaattccgggagcttccagaatttgtggtctacgtgataaactggcggatgaaggtgttctttgtgctgactgggtttgcaacgctgaagactacagtgatggtatccttcctagttcttaggatgttcaatgctctgtcagctgtgaagagtcgtctgtcgaagaatacaatagcaaagcataagattacgctgaggagcttggtcatgcagttcatggtgaccccgatctcctacgtcccagcgttcatgcttcttgtggtaacgctattcccaactgaatactcacaacagatctcctggtactctatgatgatcgccactatgcactcgattcttaattctcttgtggtgataacgacgtatccagagttccggaagacgttgatgttctggggcaaagattcaaggagcactaatcctattcttattacttcaatgatcccgtcggtgtctcaccggacttcgtaa

SEQ ID NO: 525 - DNA, 1011 bp, Caenorhabditis elegans
atgtcagaaagcttgaatattgacttcgaggtccccgagcatttgattaatcactattacgtgtcgggtacaattgcattactactcaacttattagtcatataccttctgttgtttcaaagcggcaagctagacaactttcgattttatttgctggcttttcaggtatcttgtacggcatctgacgtgaacattgccttcctattccagcctattccactatttccactgttctctggatatgggcatgggtttatgtcacgttggtttggctggagcacgcatacgctatttaccctattcacattactccttagcggtcaaatcgaggttctcacaatatgcttcctccgcaagtacaaggcaatcatgcagctgaaaactttatcaaacccgtcaagtagcctaacctatattataatctaccatttatgcatgtcctactcactggctatcacactcgcatggtacttcagcgagactagtaaagaagatcaatggaagttgattagtcaagaccatccgtcgctggtcccgaagtatcagcagcttaatgaattttattacacatacttcaacagtgcatatatttttattatattcctagtgctcactgctgctggaaccttaaagacgatcattgtgatatctcttctagtacttcgaatgtttaaagttctatcagatgttaaaagtcgcctatcgaaggggacactgagcaggcataaggttgcgctgagaagtttgattatgcagttcatgacaaccccaatatccttcctaccacccttcatgctggtagtcgtcgccttgtttccaaccagctactctcaagcaatctcccagggctcttttatggtctccaccacccattccataatcaactccctggttgtccttaccacgtacccggaattcagaaaaattctcatgttctggaggaaaaaagacgctagaagaataccaacattgctttcatctgtcagaccgactgcctcgccgagaaattaa

SEQ ID NO: 526 - DNA, 972 bp, Caenorhabditis elegans
atgtctgaagtagttgattttgaagttccgtggcatctgatctaccactactacatctcgggttcgattgcgatttttctgaatttactagtcatctatctaattttattccacagcgggaagctggatggcttcagattttacttgttggcttttcagatctggtgtaccgcttcagacgtgaacattgcgtttctaacccagccaattcctctatttccagtttttgctggatatggagtagggtttttgtatgattggtttgactgcagctcgtttacgttatttgtatccttcacattcctgctcagcggccaaatcgaagtgcttaccatctgctttttccggaaacaccaagcaattatgaaactcaagcaatcaactgacagacttccctacccatttatctacgtcctatgtatgagctactccgtagctatatctaccgcatgtcatctgatccgaataagcaaggaggaacagtggcagttgatccagctgaatcattcatctctgattccgcagtttcaaaggcttcgagaattttctctaggctatttgaattatggattaatcgctttctttgtgctaacggcatttggaacatttaagacaacgattgtgatatctgttttggtatatcggatgtataatgtattatctatggtgcaaggtcaattgtcaaaaactacattggccaggcatagagtagcattgtggagtttgagcatgcagttcatgacaaccccgatatccttcctcccggcatttatagtccttgtggtcactttgttcccaactgcatactcacaagaaatttgccgttgctcactaatggttgctaccacacattccacagtgaattccttggttgtaataacgacgtacccagagttcaggaagaccttcatgttctggaagaaaccaaggaagctgcatagaatctcgtcgctgcgtcctagtggcttgtaa

SEQ ID NO: 527 - DNA, 975 bp, Caenorhabditis elegans
atgtctgaggtcgttgactttgaagttccgtggcatttgatctaccactactacatctctggtacaatcgccatttgtctcaatttactagtcatctatctaattctattccacagtgggaagcttgataacttcagattttacttgttggcttttcaaatctggtgtaccgcttccgatgtgaacattgcgtttctattccagccaatctttctgttccaaattttagctggatacggccatggatggttttacgactggtttgattttacctcgttcacgtgttttgcaatcttcacattactgctcagtggccaaatcgaagtgctcacgatctgcttcttccgtaaacatcacgcaattatgaagctgagacccaccactgataaagtaccctatccaattatctatgtactttgcatgtgctactccatagtcatcacgttgtcatgctactctatccgaataagcaaggaggaacaatggcagttgatccaattgaactatccatctatggtgccgcagtttcaaaggcttcgagaattttcgatagtccgtatgacttatgaattgattactcttttagtgcttaatgcagttggaacgtttaagacgacgcttgtgatatctgtgttagtatttcgaatgtataacgtgttatttttgatgcaaagtcaattgtcaagaactacattggctaagcataagattgcgttaaaatgtttggttttgcagttcatgacaacacctatatccttcctcccggcgttcgtgcttcttctgaacgtggcattcccaacaccatactcacaagaaatatctaacttttcactgatggttgctaccacgcactccacagcaaactgtttggtagtgatgacaacatacccagagttcaggaaaactgtgatgttctggaagaaatcgaggggttcgcgtgtaagcatctcatctctgcgtcccagtaatttataa

SEQ ID NO: 528 - DNA, 984 bp, Caenorhabditis elegans
atgtcagttgacttcgatgtacctctctggctatatatttattatcagtttatcggaaccgtatcgttgtttttgaacttgtttacaatgttgttgatattattcaaaagcgagaaaattgacgttttccggaagtcattgcttgtttttcaggcaacctgcactgtcaccgacatccacttcaccttcctaatgcaacctctacccctaatacctatcatggcgggctattgcgtggggttcctggcaagatgctttgacgtctggacccattatctaatagccttcgtcgttgggaccatagtggcccagcttgaaagcctaacattttgcttcgtaaaaaaacatcagacaattgcaaatatcactaaaagacatgtaatctccaagagtgtcaacgatgcggtcacctggtttatgccgttttttccggtttttgggtacctcgcattttgcagtgctggaatgaagagagaagagcagatggattatgttaagctgcaccatccagagtatgctctggaattttcaaatctcccaaattttgccatctatgagctgaacttctggctctaccttgtcatttgtttcggctcacttggagcaattttctgtggagctgtattcacttttaccactgttgacatgttcaaaatgctgaaaagatcgcggcggaagatctcggtgtccaactttaaaaaacagcgatctacgatcaaaagcctcctggcacaatttgcggcttcatcccttcttcttattccgctcctttgcttttctctagttttattgctgaaattcgatggatcccaggaaattagtaatataattttaacggttttctcgacaagatcttcggttaatgcagcggtcctgattgcaactacacctccgttcaggaactttgttttgaggaaaaactcgacaaacaactttgcaatcgccacagtggctatttcgatgagtcggacgtcttttacctaa

SEQ ID NO: 529 - DNA, 978 bp, Caenorhabditis elegans
atggaccttagcacgccaatttggtatatcacatttttctatgtaatagggattttttcttttgtattaaatattgctgttattttgttagtaatttataaaagtgagaatatcgataactataagtattttattttaatgtttcaagtatcttgtatgttggctgacttccatcttagcctactcgtccaaccaatgtatctcttccgattcatgacctattcctgtgtgggcatcgccgctccctacatatgggcaagctaccttatgataatttctcacttgatcctgggagttcaatatgttctcctattcctttgcttcgctaggagacaccaagcaattgcaaaaatcaagcaacaacatgtgattcctaattttttgttatatagttttatagcttttgtgctagcttgcccagttgcagcgtgcatttgttattttcatgcaggagtcgaacgggagaaggttgaggaatttattgatcagatgtaccccgactacaaaaccgaactcttatctcttcaaaactacgtgatctaccgagactacaacgtctatatgacattttttgttatcttcaaaatggtcgccacgttcttggttttttcgatgatcgcacttgcaaccttagatatgaagaagatgctgaacgaagttcgtcgaagtatatcaaatcagaactacaatcgccacaagacggccatcaacagtctcttagcacagttcgccgccgttttggtactcctgctacccggattagcgttgtacccaataagactgtacccctatgaaactggaatgtggatcgttaacatcacctggtgcatttttcaaagccgctcatccatcaattcgttggttctacttgcaactacccctccctaccggaattttctgctgcggaatgtgctgaaaagtcggactaaaccgtcgactgtcgttgtttctatggctccgagaacagtgaataattaa

SEQ ID NO: 530 - DNA, 978 bp, Caenorhabditis elegans
atggaccttggcacgccaacatggtacatcacatatttctatgtaatcggtgtattttcatttgcactgaaccttgcagtaattctgttagttatctataaaagcgagagtattgataactttaagtattatattttggcgtttcaggtattctgtatgttggctgacttccacattagccttctcgtccaaccgatgtacctcttccaatttatgacctattcctgtgtggggcctgctgctacctacatgtgggcaaactaccttttgataactactcacttgctccttggaattcagtatgtcctcctgttcctttgctttgctaggagacaccaagcaatcgcaaaaatcaagcaacatcatgtgattcctgaaattttgttcaatagctttatagcttttgagctagcttgtccagtggctgcgtgcatttgttatttctatacaggagtggagcaggagaaggttgagggatttatcgatcagatgtaccccgatcacaaaaccgaactcttatcccttcaaaactacgtgatctaccgagaaaacactgtctatatgatattcttcgtgattttcaaaatgcttgccggatcccttgtctttctactaattgcactcgccaccttggacatgcagaaaatgctgagcccagttcgtcggaagctatcaattcaaaactacaaccaccacaagaaagtcatcaatagcctcctggcccagtttgccgccgttttggtacttctactgcctggtttagcattctacacaacaagattgtacccttatgaaactggaaaatggatcgttaacatcacctggtgcatttttcaaagccgctcctccatcaactcgttggttctacttgcatctactccaccgtaccgaaattttctaatgcgtagactggcaggaaaacgagaaaaagtgtcaactgtcgttgtttcagtacatactcgaacagggatgaattaa

SEQ ID NO: 531 - DNA, 1032 bp, Caenorhabditis elegans
atgcttttcgacttgagttcacttcaaaatggttattatgaaaacttgaagggtcctgtggattttacgattccaatttggtatgccccatacttcaatagcattggttttatctccctagtgcttagtaatacagcagctttgctaattattttcaaaagtgagaaactcgataatttcaagtattttttgttttctcttcaagtctcaagtttggttatggatttccacttgagtattttatgccagccaatatattttctctctgcgtacactgtcaattgcattggggtagcagctcccgtgatatggtgtaattctttaatggctctggaacaaagcttcaactgtgtgcagtacctatgcttgctcttttgttttatgcgacgacaccaatcggttgcaaatatcacaagcaggcatgtcatcccggctagaatgtttcagtttctaatgtttctcgccttctcctttccgccattcgctgccttcttctggtaccatgctggaatttcagaagacttgttgccaggctttattgatagggtgttcccggaatataaatcaaagttctcgagcttgcacaactttacaatatatcaactgaacttctctttgggtgtcgtcggtgttatgggatttacgggaatctttgtcgttttccaagccattgctatgacaacaatggacactatgaaaatgctcaaaggagcgagaaagacaatttcagcgcagagctatgaccgtcagagatctgcgatgaaaagtcttattgctcagttcctagcttcatgtctactagttctacctgcagcttcgttctatgttatatcagtgtacccgataaactatgggcaggaaatagtaaacatttctatggcgatatttgcaaccagatcatctgtgaacgctgtgatccttgtcgccacgacacctccgtacagggcatttttgttcggaaggattgcatcgagtcggcaaaaagcggcttctactgttgtggtgtctatgaatactgcgatcggttcttaa

SEQ ID NO: 532 - DNA, 978 bp, Caenorhabditis elegans
atgtctctagatttttcctctccaaactggcttattctatatttcaatatcgtcagttttatctcatttttcctaaattgcaccactattctattgattattttcaaaagctataagtttaacaatttccggttttttgtgctagtttttcaggtaacatgtactataacggacttgcatataaactttattatgcaacccgtgcccatgctgccagtttgggcatgtcgatttgagggagttggattgaaatttttgggcatttggccgaattatttgatggccgccatgtttacactagttggattccagtttaacagtctcggcttatgttttctgaaaaaacaccaaattattaaaaacactttacgaaggaattcgataccaaattgggcctatatagcttttataatttcaacactacctctcgtggctttgatatttatctcagttttacaaattggagtttcgaaggaaaagtcgatagaattttctagaacgaattacccccaatacggtgttctgttctccaaaatctcgaatctgatgttcttcgattcaaatctctgggcagtcggagtcctttttatatctggttttggtggatgtttattgggagccatagtttccatgacgacgcttgatatgttcaaaatgctcggcgagttgcgacgaagagtctccttcaaaaattacgcacgccatcggtcagtggtgagaagcctattggctcaatgtgcagctactgcgatccttttgcttccgggagccgcgatttttgcgatttttctgtatcctgatgagaaatcacgagaaatcagtcaaattatagtatgcatatacgcgctccgttcgtctgcaagttctgtaattctagtaataactacaccaccataccgaacatttatcataagaaaattcgcaagtaaactgggagtgaaagcttctccagcgatgggctcgactagcattatgtaa

SEQ ID NO: 533 - DNA, 969 bp, Caenorhabditis elegans
atgcttatcgattttacagtcactttctggttgagaatttactgttatattgtggccatagcgtcatttcctataaactttgggactattatgctcattacttataaaagtgataaaatcgataatttcaagtatttcatgctttggtttcagataacgaattcaattaccgacttatatatggcaattttcgcccagccaatgtctcttctgccgatttgggcggtgcattgtgttgggtttgcagcgacatatttgaatatttggtcaaattatttattttcccttctcccagcactagtcgccgtgcaattcgtaagcttggggctggcatttttaaagaagcaccagtctattgcaagtattgcgcgaaagcatctgatatctgagctcggccataatatattccgagcttgtgtgacaatttggcctattttcactttttcgctattctgcgcagctgcagtgaatagggaggagcagatggattatgtgagagagcattatccggggtacgcctcagaattcgctcaactaaaaaactttgcgatctaccggatgaacatttggatgacaatttccgcaattctattcatctgggcgttcattgtattcggttccatcaccttttacaccacattcgacatgtttcaaatgctaaatggagtacagaaaaagatttcgataaggaattataaccgtgaaaaagctgttgtacggagtttggtagcccagctgattgcctctaccataatcgcggttcctggcttcgctttcctagcctgtgcattctgggccacaggtgatttgagaactatcatcgaaattatcattgtattgtttttgctacgtggctcaatccattcagttatcctaatagcaactacatcaccatataagaaatatattttgaggaaaattccgcgaaagatgccacctacctcttcaataatagtttctctcacttaa

SEQ ID NO: 534 - DNA, 1008 bp, Caenorhabditis elegans
atgcttgatatcaatttttcactaccttactggctctccgtctattttcacattattggctcaatttcgttgattgcggacatattttcgatctacttgatattgtttaaaagcgaaaaaatcgataattttcgctattttttgctgaattttcggatctcttgcatcttgaccgatttccacctcactttcctcatccagccagtaccattctacccaatcctagcagggtctataatgggcttcgggatccgactcggcgcaactctgcacttcggaattactggattcgcatttttactcacctatcaaattggcagcatgattatttgttttgtcagaaagcatcaaactattgcgaaaactttgcaacagtacagaattcccagatggggacttatactgatgatgacatattttttgaccttcaccatgggggttacaggatttttgtccgtattatctgtgccggaggatctgaagtttgattttgtggaaatgaactaccccgacctcttaccccaattccagaagctcccaaacttttcaatctatgaattctcttcaaagtttctggcgttaataattttctcaattcttggaggatttttatcttttactgtgtttatcctagtacttgtcaatatcctccgtatgctgacaattctcaagctcaaaatctcaagctcaaactaccaaaagcaccgggccgcaatccgaagtctgtcggctcagttcgtcacgtcagcggtgatctttgtgccgcccatagtgtgcgtcgttgtgataatggtcggattgaatggctcacagttaatagtagaagtgttcctaatggtcgcttgcctccactccacgttaaatgttatagttctaattgtcacttgtcctccgtatcgaagatttttgattcagctggttcagcggaaaaactcaccaaagtccaaaggagcacgttcagttcttgtgagaaactccgcaattgctatttcaaactttaataaataa

SEQ ID NO: 535 - DNA, 993 bp, Caenorhabditis elegans
atggtcgacttttcggttccattttggctcatctactatcttcatggaatcgggacaatttccctgctcttcgacgctttctctgtgtatttggtgatgttcaaaagcagccagattgataattttcggtttttcctgctcaattttcagattgcctgctccgttacagattttcatatcactttcctcatgcaaccggtgcccctttaccctttaatgggtgggtatgcccttggatttctgccaatgaaatttggagtttcattacattcgtgcttgacagctgtagtgttcctatacatctaccaagtcgctagcatgatagtttgctttgttcggaaaaatcaatcaattgccgggacactgacatcttttgctattccggctctattgatcatatttctagtaggatttctggcagtctacacgttttcagtagttggaatgtatttttgctcgggtattacagagaatgagaagatgaaatttgttgaggagaaccttcccgagtacctctcatcttttcaatccctcccgaacttctccatctaccaagccaacgcccttctctttatcatggtgattactgctgtcattggcggcctactagccttctccttcttcatggcagttttgtataacatttttcgaatgttaagtttcatgaaagttcaaatgtctgacaccacttataagagacaccgagccgccgtatggagcctgattgcacaatttgccacgtcgataatttgctttttaccaccaatttctctggttttcgtagtgtttttgaagctacctaatcctcaggtaatcgtggagcttctcctcgtcgtcgcctgcctccactcgcccgccaacgtgacagtgctgatgttcacgtttccgccataccggaagtttgtctgtgtgactattttcaggcaaaagccaacaggattggaaccgatatctgcaaagtcttcagtgatggtttcccacttggcaaaataa

SEQ ID NO: 536 - DNA, 1005 bp, Caenorhabditis elegans
atgttcgatatagacttttctattccatattggctaacaacttattatcacgtaattggagtaatatccatactgttcgactccttttcgatttaccttgttttattcagaagcgataaaatcgataattttcgatattttttgctctattttcagctagcctgcacatcaaccgatataattttgacattcctcatgcaacccgttgaattatatccgattctcgctggatacagtatgggtttcttggctcaattcggagtaacaacacatttttgtctgacaatgctaatgctcagcgaaatctatcagattgaaagtatgatcttctgttttctacgaaaacatcagacaattgcctcaacgctcagaaaatatgcaataccgaactggctggtttggagttttttcgcatttctagcatttcatatttgtgcaatgggtgcactattttctcagaccagcattgacccggagcagcaaatggaatatgttaggatgaatttccccgaatacctccaaggtttccaaagtctcccgaacttttccatctacgaagctgatgcgtatttcttgggcaccgtgatttttgcagtttcatgtggaatatttgcatttttagttttatgtattgttatagcaaacatttttcgaatgctctcacttttaaaaactcaaatctctgcctcaaactaccaaaagcatcgggccgccgtttggagcctccttgcacaattcgccacgtcaggtgtctgcttcatcccaccccttgctctagtatttgtcgcgttgttcagtataaatagaggacagtgtaggttcatttcagtaatcgtagagtatctcctggttatcgcctgttctcactcctcactcaatgtcttggtgctcattgccacgttcccgccatatcggaagtatgtgttatcacttgttaaacgtaaaaaaaaaatcgcgagaaccggattgtcagtgctttccctgaagccttcccaaatgagttaa

SEQ ID NO: 537 - DNA, 1005 bp, Caenorhabditis elegans
atgtatgatatagacttttctactccacattggctgataacctattatcatgtaattggagtgatttcactaatcttcgactctttttcaatatacctaattttattcaaaagcagtaaaatcgataacttccgatattttctgctcaattttcagctagcctgtacattaactgatattcatttgacatttttcatgcaacccgttccgttatacccattggtttctggatatactttggggttcctgtcaatgttcggagtaactactcatttttgtatgacagcattaatggcatgtttaatatatcaaatcgagagtatggtgttctgtttcgtgaggaaacatcaaacaatcgcaaaaacgctgaaaaagtacgtaatgccaagctggctggtgtggggaatattcgcattttttacatttgggatctgtctgacagttatactattttcacagactagcattgatccggacttgcagatggagtatgttagagtgaagttcccagagtacctctccggcttccaaagccttcctaacttctccatctacgaagctgacgcatatttcctggtcgcattgcttctcacaacgactggtggaatactatcgcttctaattttatgcatagtcctaacaaatatttttctgatgctcgcacttctgaaaactcaaatctctgcctcaaactatcgaaaacatcgagccgcaatttggagcctattggctcaatttgccacgtcatctgtcttatttttttcgccaatcgttttcgtgtttgtcgtgttgatcgggatcaatggagctcaagcaattgtcgaggttctcctggtcattggttgcttgcattcctgcctaaacgttactgtattaattttgacgttcccgccataccgaaagcatgtatgttctcttatcaagcgggaaaagagtttcgcaaaaactcgagtgatggttctgccttcgaacccttctgctatggtgatctctcatttaagttaa

SEQ ID NO: 538 - DNA, 984 bp, Caenorhabditis elegans
atgtataacatcgattttaccgagcctcactggttgatcaatagttatcacgctgtcggtttattttcactggttttcaacttgctcgctatttatctgctattttttgaaattaacgatcttggcacgtttcgatacaacttgctgatttttcagatggcgagcttgcttactgacctcagtattacaaccctttcaactattgttccattgtatccgttgaatgccgtcacaaccttcggaattctttctacgtggttcggtgtgtcatcccacttttgtttcgttttttctggagggtgttcgcatctggaaaatgtgaccttacttttgtgcttcttcaagaaacatcaagcaatcgcaactataattgatgttcacgttgttccaaagtttcttggattcgcctgttacctgctagtgctagtgcttgcttcgattcctctcgttggattgtctctcttatctgtctcgcgagatgagcagctgatttatattaacatgacttcaccagaatactattcaagctttgcaagccttgaacaatttgccgtctggagagaatcctgggctttgcttggagtttatataattgcactttgtgaaatgtcaacactcgccggcctccttgtattcttcaatttggatcttgttcgcatgatggttaaattgagatctaaagtctccaatttgaacttccaaaagcatcgagaagcgattcaaagtctattcattcaaactctcgtctccctgatctgttcaacatcgccctgtatacttggattctcagtgatgaccaaaatggaaaacgcgcagattataagtgaactgtgccttctggggttcgcttgtcattcgccggtcaacgtgatctcattgctcatattttccccgccatatcgcagatttttggagaaactttttcgaagaggtaaccgtcaactcatcgttcatccgcattcgcagagtggagtaaaccaataa

SEQ ID NO: 539 - DNA, 978 bp, Caenorhabditis elegans
atgtacaacattgacttttctgagccactttggattgttaactattatcattttattggaatttcttctctgttaggcaatatttttggaatatacttgttaattttccaaacgaaggagcttggcgaatttcgatactatctgctgctttttcaggttgtatgtacagcaacggacttgaatctcactaccttcatgaaattcttgccatattatccaatcaacgctctcggaacgattggatatttctcgcaatggttcaatatgcccactcattattgcatgctagtcagtctgacgttcatatactacgagtccgaatgcctagctctgtgcttcttccaaaaacatcagaaaatcgctagtgtcatcgatgttcatgtgattccaagatatgcaatcatcatcggatcgttgatatttttagcttttccagtctatccgattattgccatgcagattctcgatgttggacaggaaaagcaattggaatatatcaaagagaatcttttcgactactacgctggattttcaactgtaccacatttcgcaatttacgtcgactcaccactgttgtacagcgtctattctgtggtcttgctaacaatgggagctattttcggatgtttggtgctcgtcaacactgacctcattcgcttgatggttcgcttgaaacctcaaatttcccagcaaaactaccaaaaacacgcggaggcaatccaaagcctaattgtgcagatgtttgtcgccggtctctgcgcattgccactgttcggtgtagctttcgttcttgcttttcaaatggagaatggtcaacttattgggaaactcatgtttgtgtgttgtacctgtcattctacaattaacatgatttcgttgttcatcttttttccgccatatcgaagatatttgctcaaaaaatttggaataaaacgacggagtctctttcaagtgggcgcgtcttctgtgttaagttaa

SEQ ID NO: 540 - DNA, 942 bp, Caenorhabditis elegans
atgtacgaaatagacttcagcgagccacaatggcttctcaactactaccatattatcggttcaatttcgttgcttcttaacttgtttggcatatacttgcttctattcaaaagtaaccaacttgacagtttcaaatattatcttttggtttttcagctagcttgcacattgacagacatttatctaacgtttctaatgcaagcagttacattatttcctacttttgcggggtatacagttggcattttatccacgtggtttgacgtttcgtcaagcacctgcgtagtgacaaccgctttcatagcattaatccaactggaaagccttatggtatgtttctacaagaaacatcaagccatcgcaacgattctcgaaatacacgtgcttcccgacatcattttatacacttgttactttctttgcgtattttgtccgctaattttttgtggtgttgtgaattacttgaatttggatagagaacaaagcttggtgttcatcaagcagaactacccagaacactacataaacttttcgaaactttctcattttgcactttatgtgagttctccggttatatatgtcgtattcggtatggcaatttttggaggattgctcttttttgtattattactcatgtttaccattgatatattctctatgatgactaatttaaagcaaaaaatttcaaaatccacgtatgagaagcatcaagacgctcttcgcagcttgatggttcagtttgtgacagctatgctgtgtctggcgcctccaatttttctaacattggtcttaatttttgaggttccacatgtgaatgttattggtgaaattttgattgcctggtttgcgagtcattcgtctataaatatgatatctcttttgatatttttcccgccttaccgaaaattatttgtaacgtttttgaaaaggaaatcggcataa

SEQ ID NO: 541 - DNA, 975 bp, Caenorhabditis elegans
atggaggacattgatttttccgatcctcgctggcttttgaattattttcatttaattggattggtttcatttattctgaattctattggaatttattttttgatatttaacaccaatcggttgggaaatttcaagtactatttgttattatttcagctttcatgcgttcttacggatattgatcttacgattctcgtgcaaccaattccgcttttcccgttgtttgctgggcatgtatatggagtattattcacatggtttaatatgcaggcaaacacttctgcggtcactgttgcatttgtggccgtaattcaactagaaagcctaatcgtctgtttcgtgaagaagcatcaaggagttgcaattctattgaacaaacatattctgtcaaaatgcgtaataaacgcgttatacgtactttgcctgatttttccatttttcgtctgcgcaggtgcgaatagcattagtctcagtcgggaagatgcgctgatctatatcaagaaggtctatccgaaagggtacttgcaattctcaaacttgccgaatttcgtagtttatatgaagtctcaaaacacaataatatttcttgtgacacttttttttgctgcaagttttgggttcctatgtctatgttttactatatatgatattattcgtatgatggctgacttgaaacttcgaatatccaaagtggcttacgagaagcatagcgaagctcttcgaagtgtgatcatccagtttataaccgctgtgttgtgtatggcgggtccgatgatacaggttctgatcttagttttcgaaattccacaaatgaatttcatatctgaattaatattcgcttggttcgcaactcattcatcaattaacatggtttctctatttatatttttcccgccatatcgcaagattattgcaaagggtttaaaaaaaacaaaagtgaacataaatcttcccatttcttcgatgggactttaa

SEQ ID NO: 542 - DNA, 1116 bp, Caenorhabditis elegans
atggcgactccaaccgagattgcctataaccgggcggctctcatcgaaagccttcagttcacttttgtgatggatgaagttggaaaacatctgtcagaggtgatttgtggatttggaatcgtcttgaaccttctgctcatctacgttatcttcaaacgaactcccaagcacatgagaagttacgcagttttgctattcaacttcgccatctttgatcttctaacctgtgtggcatctcttcttgcctgccaaaaaaccattttctccggtttatcactcacatacatcttccatggaccatgcaaatatgtctcctcttcgctttgcttcttctgtcactgctttgtctgtcatgcgatggcacattcgcaatggattctactgatttccttcatctaccgttaccgtgtgcttgtcgatggggctccagacacgaagaagatgattgtaattgtgtcgcttttctacgcaatgtctgctgttatctttctgttctacttctgggatatcggagacacaaatgacttgaaacaaatcatgtacgaccttcatccacagtatcattatgacgatagagagatttggggagatatagtggtgagtggaaacaccacagttcttacgattccatcattgatcgcaattttctacatgacaatgccatgtgttccaatctattttatcattcactacttccgagataagactctgagcacacttgccagcaatgcattgagcatgtctccagcaaccaaggcttctcatcaaaaacttattatggccttgtcaatccaagctgcgattccaattttctggctcgttgcgtctggaatctttacacttgccgaatttggcatcatcgatggaccaatccctgagaacataacattccgtttgatggattgcattccgtcatcgagcccactggttgcatttatcttcatcgctccgtacagagagggacttctccgaatcatttcaaagacaggaatctaccgaaaacaggagaatcgggtttccagtgttgtcgagaaattcaaccaaccacccaagcaaccaaccaatccggcacagcaatcagccaacaacgacgctgctaaaaccgaaaaagtgtaa

SEQ ID NO: 543 - DNA, 1035 bp, Caenorhabditis elegans
atgaacgcaacaaatttgcaattaatttcgcacgcgcaaaaaatcgatcatgtcttcaaaatcattggatatatcgtcaatccattagggattctgttcaacaccttgctcataatccttatttccacaaaaactccaaaacttctacagagctattcgatgttgcacttgaactttgctctttgcgacctattcagttgtcttgctggaatgcttgctcttcaaaaaattgtcttttcgggctggtctttaacttacatatttcacggagcatgcggacaaatttcatcatatttctgttattttcttcatgtttttgtttgccattgtctagctcattcacagtggattttgatgatctcatttctttatcgatattacattctcgatcagatcagtccggacactgtgaaaattgttcgaatctgtattttaacctaccttccatcactcctatttgtaatcgtgtactggtcggatgtagccaacgaagacgcgctgaaaagaattgtgaattcatttcacccagagtatatatatgactctaaggaaatttggggagacctggttattgctggtaacatgagttgctggtcagctgcgaccttctctgcaatcgtctacatgacaatcccatgtttcccgatctacggagtcattgtctttttccgtcacaaaaccttgaaaagtctggatggccgtgggcgaataacaatgtcagagactacaaggtcatcgcacaagcagttgatcaaagctctgacaatacaagcaatcgtcccaattttttggctcacagcgtccacattctacctgttagctttgtttcaagttgttggtagagtgattgtggagaacatgccatttcggataatggagtgtatgccgatgattaccccactgatttctctgtactttgtcagaccctatagatcagcgctaacaggctggttttttccaacttcgcttcttaagccagtaatcgccagtgcaatgctgagttcaactgctgcatcggtcgccccaactccgtaa

SEQ ID NO: 544 - DNA, 981 bp, Caenorhabditis elegans
atgtctctagtttttgtgatcttccacagtgttctttctgcaatcggatgtgttttgaactcaatgctttgccacgtggctgcttggaaaagtccaactgttattaaaacatattcaattattactgtaaactttgccattactaatttgacaatttgtggcgtaaattttatattgcagatgagaatggttcccattgagaaaacaatgatttttgtgtcatatgggccgtgccaatggttgactgacagaacttgttttaatttatacagtgttcttgtccatgtctacacccatacaatatggcttcttctgatctcattctgttatcgatactacgtaatgataagatctgagccatcaaaacgtcaagtagaactacttttgctcattatttatctaccttcatttattcaaatgattctcttattttttgattttaccgatcctttgattcttttggatattcaacagaatctagttcctcaatacaatttcacagatcttatgatatttggagttgccgatagtacttccttcaatgcaatgtattcaatcgtccacgtggctgttatgagtactccaattgtgttgtgcattgtggttttgaggaagaaaatattgagaaagatggaatttaaaggagttcaagtaaatgcaaatacgagaagcttacagttacagcttcttcgagctttaactttccaagcagtaattccgggcttctacttgattggagttgccagctattttgtcagtcgactcgaaatctaccgtgatccattttttgaatatttaattttctccgcgttcttatttgttcccgttctaaccccaatttcttcgtttatttttgtgaccccctaccgaaaatggttcctgaaaacgtgtcactggaggaattatcgtgtagagtctgaaaactatgatacaaaagaagatactcatgagacacgaggacatacagtttcagttagataa

SEQ ID NO: 545 - DNA, 1026 bp, Caenorhabditis elegans
atgattgaagttatcgttctgatgatttactatgccatccttggagcattcggaatagtcctgaatggtcttcttttgcttttagcaatattccgatctccgtctcaaatcaaaacctaccgaattctaatcatcaactttgcactcacggatatgttttcctcatttctaatgatgttctgtgcaccaagaatcataccactcgactatgccatggcccatatattttatgggctttgtcactttggacatccatttttatgttacgcatcctggagtgcacttcttcatttattcatacattcaatgtggtcactactcttatcatttgcatatcgtaactatatactctcatctgctcccccatctacgtggaaagtattcatgttcagtgtttttatatacattccatcattcactcagttcattgtgctaatgttcaccgccgcggatccttatttgatttttggaatgttgaaatcaaagttcccagattatacatttgaaatttcaactgttacgggaatatccgatgcattatctccagctgctacattttcaatcctaaacatgacagttccagtttttgcgatttacactgcaatccttgtatttcgaaggaaaattctttgccgtctcgggaaaaacaccgagaatttacgttctgaaacaaaatccatccacaagcaactgttgagagcattgacgctgcaagcttgtcttccagttttatttgttggcggagtattctgcttttttatccaagcaatccggctgattacccacccaatttttgaatgtctgatatgtgcaattcctgctccaatcccacttttatcatctattatttcactttaccatatccgaccctatcgccgggaaatcttgcgtatctttacaagagtaaccattcctattccacaaattgaaccggcttcttctgcagttgctctcgctgctaaacataaaatttctgtacttagcatggggaggttacatcgattaagtgttcccaacaattcttaa

SEQ ID NO: 546 - DNA, 963 bp, Caenorhabditis elegans
atgtggttagacacattatactggtctgtgattggtgttatcgatgttcttgcgattcttttcaacgcatttctcatctatttggctttatatcgtaccccaaaaatggtcagagtatacactacactaattattaatttggcttttaccgactgctgctccgcgtttttaaacttttttgttcaacagagaatgattccaactgcatttacaattggatatatttcaaatggattctgtaaatatttcgggtatcgagtttgttttttcagtcacaacctgatggctcatttcatagttcattccaattattctcttgttttatcatttgcatatcgatattatattcttcgaaaacccgaaccccaacggaaaactgttcttatagttttatttttgacgtatctaccatcattcttgcagttgatcctgtatcaatttgccgaatctgaaccattggcaatcattgcactccttcaaccatatcacccaaaatacaatttcacaggattaacagtcagcggtgttgccgatattcgaagtgtttatgcattgtataaaattctacaaatgacagttatgactattccgattttctcaacgattttgtatttgagaaagaaaataattgataaactactctatcgcggggtcaatatttccctgaacacgaaaagcttgcattcacaattgttaatggctctaacatatcaggcactacttccaactctctactcgatcaacgttgtaatgtacgtactggaacagtctggcatctatgcttctccttttttcgagaactttataatgtctggcttggttctaataccatttttctccccatttacttcatttttcttcttttctccttacaagcgtattgtattaagaattttgatcaggaaattgaacaaacgccaagttgccatgtcagagactggccctggaagttttcctatttaa

SEQ ID NO: 547 - DNA, 1014 bp, Caenorhabditis elegans
atgctggactctatcacattattcttcctttctttccatacgtttgccggagtttctggctgcattctcaattcaattgtgctctttttggcactttttcggactccgaagacaatcgccgcttacaccacaattctcataaactttgcattgaccgatttcctcgcctgtttcacagatcttttcattcaaatgcggcatattccggctggatttacaatggcttatttgtcacgtggactgtgcacttattttggaccccatgtctgctattttatatacagcataaacatttcattagtagctcatggtctatggtcattgctaatggggttctcatatcgatattatatcctgtttcatccggcaccaacgagaaaagctttgatagtaattcttatgtttatatcaattccgtcaattatccaaatgataacatttctgtgggcagacgatgacgcagatgaaatgaagcgaattgtcgtcgaacgatttccggaatatcaacttcaaaacgaaactatttgcggaacaattaatattattgagttttctgcaatgttcacaattctacatatgacgtgcccaataacaccagtctacataactatttggatattaagaaaaaagattattgagaaccttacttctaattcaaaggatatgtcatcaaaaactaaagaaatgcataagcagctattgaaggctctcacatggcaagccatgatccctggcttttacggaatgagcattgtatcttacgtcattgggcaattctttttcaatcaccccgtatttgaatatctcacgctcacaggattcctttttatgcctgttctttctccactctcttgcctgatatttattcaaatttaccagaaacgagttctatcatggtggtacaaaatgattggaaatccaattccagatgagtggcttacagtgttgaatgcgactagaaccaatgcaacatcaagtgtcgctccttcaaatgaaatcaaatctaaacattaa

SEQ ID NO: 548 - DNA, 978 bp, Caenorhabditis elegans
atgtttgattttgctgttctcttctcatgtgctcatgccataatttccgtgcttggaatgtgtttcaatgccttgttagcctacttggcactgttccaaactccacgtgtcatcaagtcatatgccacgttaatcgttaactttgcaataactgatttcttcgcttgtatgtttgatttcttcgttcaacagagattaatcccaactggaatgactttggcatacgtttccaatggattctgcaagcattggggtccgagaacgtgcttttttggatacagcctgatgctccatttcctgtcccattccctatggtctctgctcctttctttctcatatcgttgttatattctatacaaaccggctccacaccgtcacactcttgtcattctcttaatgattatctacattccatccctttttcaatggatctccttcatctggtctcaggacgatccagaagagattcgagagattctccacgtcgcatttccagcttacaatctgacaggacacgttgtcactggaaccaagaatatattatgtttctcggctctttacacaattcttcacatgactattccaattactccagtttacgtctgcattctgattttgagaagaaaaattatttcaagactgagttatcagggagtcaacatcacaagtgacaccaaaaatttgcactctcaacttttgatggctttaacctatcaagcagcaattcctggattctacttgttcagtatttactcatatgccattggacaatttggaatctacaatcatccagctcttgaatatttcacattttcctcatttcttctgattccatttttatcgcctcttgcctctttcattttcgtaactccctatcgacaatttatcaagctaaagctgtttagaattgttcaaattgaaccgacggaaacatcgaatactcctcaaaactatacaagtattcatattattggataa

SEQ ID NO: 549 - DNA, 978 bp, Caenorhabditis elegans
atgattgacttctcagtagtcttctcctatgctcatggagttattgcaatatgtggaatgcttttcaatgctttgttaacatacttggcattgttccaaactccacgtgtcatcaagtcatacgccacgttgatcgtcaattttgcaatcactgatttttgtgcctgtctctttgattttttcgttcaacaacgactgatcccatcggatttatcacttgcctacatttcaaatggtttttgccatcattttggaccaactacgtgttatgtcggctacagtctgatgcttcattgtttttcccactccctttggtctttgctactttccttttcataccgttgttatattctttacaaaccagctccaactcgtcctgttcttgtacttatcatattcttgatctacacaccttctctgttacaatttgtttcatttctctgggcacaggacgatccagatgaaatgcgagaaattctcactaaacatttcccggcatataatttgacagagcatactgtatatggaacaaaaaatattatttgcttctcagcactttttacaattcttcatatgactctaccaattactccggtttacatttgtattttaattttaaggaggaaaattacatcaagattaagtgtcaatggtgttaatatcacaaaggagacaagaaatatgcattctcaactactaatggccctaacctatcaagcagcaatacctggtttctacttgttcggagtaacatcttatgccattgggcaatttggaatttacaatcatccagctcttgaatactttacattttcgtcatttctcttgattccacttctttctccactagcttcttttatttttgttactccgtaccggcgatttatcatgcactactttttcaaaacgactcgtgttgaacctggagaatcatctttaacacgtaatatctatactagcaatgcttatactgggtaa

SEQ ID NO: 550 - DNA, 1014 bp, Caenorhabditis elegans
atggcacaagaaattgctctatccatttttgtaaagtcttggcatatattcttcgggatcactggagtcattctaaatctagttttgatcctccttgtagtcttcaaatctcctaatgcaattcgtgtgtactcaagactgataaccaactttgccgtcactgactttcttgcttgcttgttggatattttcatagaaatcagagttctcccttcgcctaatgaagctacaataacatatattttaaatggattctgcacatactttggattgtcgacttgtgccattgggcttagcatgtacattcacacactgacacactctctgtggtctctattcatctcttttgtttttcgatatttgattttgtacaaagtttcgttgaaggagaagcatattttgttggccctttttgtattctatattccttcttttgtacaagcagcaacttattggaccagctttgtagatagttccacaatcttacccattacaaagcgaatctatccacaatataattttgagcttgaaactggcctgattactggaataacaaatttattttctgtatctgctatatatgcggtattacacatgaccatccccgttacaccagtctatataactattttcattcttcgacgaaaaatcctaaaaactcttatgatgagttacaatgtaatgtctaaagaaacaaaggcaattcatgctcagttgatgaaagcactgacttttcaggcattcattccagtggcagcttgggcagctgtttatgtctatattggaatgcaatttggtataatcagtggaatatttttcgaatacatggtattctctacagtaatattcatgcccttactttctccagttgcatatctggtttatgtgcgtccataccgattatacattctcagaacgttctgtcggaaatgctctcaaagtgcagtggagagtaagatccgaacgggattccacacacaatatgatcactcaacagtgggaagaagtgcttaa

SEQ ID NO: 551 - DNA, 1023 bp, Caenorhabditis elegans
atgataacggacagtgaattgacaagttatttccggatccttcatgcaatatttggaggtactggatgcattctgaatgcagttctcatactactcgttatatttgaaactccaaaacatattcgtttgtattcaattttgattttaaattttgctatttttgatctggctgcttgtattttggacatttttattgaaatcagggttctgccctacccgaatgaagattcaatggcacatattatgaatggtgtttgcaaacactttggattgacagcttgtgccgttggattcagtttgtatttacacacactgacccactcaatttggtcgttgctcatttctttcgcatatcgatatttgattttgttcaagacaacttttaaaagaaataatattttattggtgattcttgctttttattttccctcgtttttgcaagctgtaacatactggacaaattttgtggagcgcttcgaaattcttccaatactcatgagagttcaccccgactatgacttcagtgatagctctattttgataactggaattactaatttatatacaccatctgttgtctatggaatgctgcataccacactccctgttacaccaatttatattgctattttcattactcgatggaaaataatcaaggttttaaagaaaaaccaaagttctatgtcaaagggtaccagggcacaacacgaccaactgctaaaaattttaacgattcaagcaattcttccatcaacttcattttttacctcgtggctgtttatggggttaagatttggtttgttccaaggtcaagtctacgaacatttggttttctcatgtgctatttttatgcccgtaatatctcctattatatacatagtttttatcaaaccttaccgagaatttttcgtcagatcattttgcaaaaaatgctttaagaatgtagttcaagacagaactcaaacacaaatgtatagtaatccagaccagtcaacaagcgggaatagacaattgaatagataa

SEQ ID NO: 552 - DNA, 1020 bp, Caenorhabditis elegans
atgcacgcgttctttgaaatatggcactgtatatgggctttacttggatgctcattcaatttaatgctcatttacatggctatctataaatcaccgaagacaattcgttcgtatgcaactttgattatcaattttgctgttaccgactttttcgagtgtgctttggatttgttcatccaaattcgacttatgcctgcacctggagatgtaacagtaatttatattctcaatggatcatgcaaatatatcagccagtttgcatgcaagattggattaagcttattccttccgtgtatcacacattccgtttggtccttgcttttatcatttggatatcgttactatattcttcattattctgcactgacacgactaaaattggttaaaatcgttttgctcattctgataccgtcactattccaaggactcaccttttggacatcatttgccccattggaaataattcttccacttgctaaaaaatggttcccacaatacaactttgaagctgaaactggtgtgttgactggaattgtagacataactcattgggcagccacctatgcagttttcaatatttgtctgccaatatttccaatttacattgcaatattcatactccgccagaagattatcacatttttgggggccaagacacagagtatgtcaccagatacaaaagctgctcactctcaactactaaaagcacttacaattcaagcgtttattcctatttttatgggaattggagtcatattttatcttattgctcaatctggattaatagtctcaccaattgtcgaaaatgcaatcttctccattgcaattctaatgcccgcactatctccgttaacatatttttattttgttagaccatatcgacaatttttgaagagaatattcaaaaatccattcaaagtgtcagcagcatacgttcaacgtacgggttcaagcagtgcaatgtttcaatcgggaggacatccatcacaaattggaacccaggcaacaacagttctttaa

SEQ ID NO: 553 - DNA, 1014 bp, Caenorhabditis elegans
atgataattttctttgaaatttggcactggtcatgggctcttctgggctgctatttgaacttacttcttgcttacttggcaatattcaagtcaccaaaagcaattaaatcatacgccacattgattataaattatgctgcaactgactttgtggagtgtgcattagatagttttctacaaaccagattgttggcggtgcctggtgaagctgaactcgtgtacatattcaatggaccttgtaaatatattggttccatatcctgtaaggttggattgagcttcttcttacactgtctgacccattccgtttggtccttgctgctatcttttggatatcgattttacattttacataatccttcactttcccgccttgttttattgaaacttattttagttttttatataccatcattaattcaagcactcacatattggaccatatttgcttcgcgcgaagaaattcttcccctcgctaggcaatggtttccctattatgatctcgatgcagaaactggagttttgactggaattatagatcttaccaactttgtagcaatatattcaattggtcatatatgtttgccatttttccctgtctacatcacaatttttattttacgacaaaaaattataaaccaactacatgtcaaacaacatgtaatgtctccggatacaaaagctgcacattctcaactgctcaaagctcttacaattcaagcatttattccaatttttgtagggattgctgtgacattttactttctttcgcaatctggacttgtgaggtcaccaattcttgagtattcaatatatgctgttgccattttagcacctgcattatctcctatcacgtatttatactttgttcgaccgtatcgtcagaacgtgaagagatttattgcaaatccattcaaaattctactgaatacaaacacaggatcaagcattggagttttccattctggtggacgaccgtcaaattttgcaacaactttaaatacatctcgataa

SEQ ID NO: 554 - DNA, 1020 bp, Caenorhabditis elegans
atgataattttctttgaaatttggcactggtcatgggctcttctgggttgctatttgaacttacttcttacctacttggcaatattcagatccccaaaggcaattaaatcatatgcaacattgattataaactttgccgcaactgattttgtagagtgcgcgttagatcttttcatacaaacaagattggtggctgtgcctggtgaagctaaactcgtgtatattttcaatggaccttgcaaatacactggttccttatcatgcaaagtaggattaagcttcttacttcactgccttacacactctgtttggtctttgctgatatctttcggataccgattttatattttgcacaatccagcactatcgcgcttaactttactgaagattaccataatgttctacataccgtccttggttcaagcacttacctattggacattatttgttcctcgagaaaaaattctcccgctcgctaaacaatggtttccctactatgatcttgaaactgaaactggggttctcacgggtgtaatagacctcacaaatttcgttgcagtctatgcagttgcacatatttgcctgccgtttttcccagtttacataacaatttttgtcttacgccagaaaattatgaaatacctgggcggtcaatctcaaatgatgtctcaagacacaaaagctgctcatactcaattactcagagcacttactacacaagcaattattccaatgttcttagggattgctgttcttctttatttttcttcacaatcaggactactcaaatcaccaattcttgagtattcgatattttcagttgctattctaatgcctgcattatctcccatcacttatttatattttgttcgaccgtatcgtcaaaaagtcaagaggattatcagacatccattcaaacttttatcaagaccacacgagcgtgcaacatcgaacagtggtgtattctattcaggggatcatcccacacatttttccaagcccgtgatagccgttcactaa

SEQ ID NO: 555 - DNA, 1020 bp, Caenorhabditis elegans
atgataattttctttgaaatttggcactgggcgtgggctcttctgggttgctatttgaacgtacttcttgcctacttggcaatattcaagtcaccgaaggcaattaaatcatacgccacattgattataaattttgctgcaactgacttcgtggaatgtgcattagatagtttcctacaaaccagattgatggcagtgcctggtgaagctaaacttatatacatattcaatggaccttgtaaatatactggttccttatcatgcgaagtaggattcagcttcttacttcactgccttacacattctgtttggtctttgctgatatctttcggataccgattttacatattgcacaatccagcactgtctcgcttaactttactgaagattagcataatgttctacatactgtccctggttcaagcactaacttattggacattatttgtccctcgaaaagaaattatcctgcacgccaaacaatggtttccctactatgatcttgaaactgaaactgggattctaacgggtgtaatagaccttacaaattttcttgcagtctatgcagttgcacatagttgcctaccgttttttccagtttacataacaattttctttttacgcaagagaattataaaatacctaagcagtcaatctcaaatgatgtctccggatacaaaagccgctcattctcaattactcagcgcacttactgcacaagcaatcattccaatgttcttagggattgctgttcttttgtattttgcttcacaatcaggactatttacatcaccaattcttgaatattcgatatttgcaatttctattctaatgcccgcattatctcccatcacttatttatattttgttcgaccgtatcgtcgaaaagtgaagagcattatcagaaacccattcaaaatattgtcaagaccccacgagcgtgcaacatcgaacagtggtgtattttattcacgggatcatccgatacatttctcaaaatctgtgattaccgttcactaa

SEQ ID NO: 556 - DNA, 972 bp, Caenorhabditis elegans
atgtacttcggtacctaccaaatcatccatgcaatcctctccattttcggcgtcggaatcaacattttcctactgtttctggcactgaccaagtctccgaagattatgcgtccatgctctgctctaatcaccaacaagtcattgactgatataatgtcttcagtggcaaacttttttgttatgcaaagaatcctcaccgacggatcatcagtcaccatcataccgaccggcccttgcaccatgattggcccaactgcttgctatgcaggtcacatgtttatgggaagctttttggagcacaacttgatctggctcattgcttgttacctattccgttactatatcctctatgtctgtgatccttcaatcaaaagcatcatcttcgccgcatttcttgtctataccccgagctttgttcacatggcaatgtggattaagttgttcgatgcagagcagatggaaattaaaatgaatgaaactgaactttttgccaacgagctggaatttccagagatgcagctaaccggccgtatagtgtattggagttcaattgtcgtctacgttcaactcgtgttcacagcgcttttggttgtaatcgcctacacctggataagaaatgtgctcattaactttctcataagcatgggagtctctctctccaaggatgtcaagattatcaatcggcaattggttaagatcctaacattccaagtgtgcattcccatctggatcttcctcggtgtcttcttcttcctcgccatgtacacccaatccactcgacccgacactctacagtatgccatcacaatttctttcatgttggctccagttgtctcaccatttgcgtacatcttctttgtaccccattactggaacttttgcattggcaagaaatatgttgctccagcaaattcatcgatttgtggaacctcggcgacttgtggcagtgtggaaaagaaatctgtggcttaa

SEQ ID NO: 557 - DNA, 954 bp, Caenorhabditis elegans
atgctctaccagcttcttcatacggttttgtcagtaactggcgtcacgctcaatgcgtttatgatgtatctggcgctgacaaaatcaccgaaaattatgcgtccatgttcggcaatcatcacaattaagacgttcactgatattttgacgtcggcaatgagctttttcgtaatgcaaagaatcgtcactgatggatcttccattttggtcattccaactggaccatgcactcgtctcggcccaactgcttgctatgtcgggcatatgttcatgttatgtttcttggagtgcaacttaatttggatgatatcatcctacatttttcgttattacattctttatgttcgtgatccttcaatcaaaagtcttgtcttcgttgcactctgcttatcaatcccatccttcatccatatggccgcctggatcaggtcatacgatccaaacgaagcattcgttgttccagactcttttggattggcatcaagtcatttgattttgggaggtcatattgtctaccggtcaacaattacgcttatcttgcaactatttatcacatccgttctggttctgattgcttatgcatggattcggaatacacttctaagttttgccatcaaaatgggttccgataaaaacgatgtgaaaaatctaaatgcacgacttgtaaaggttatcaatttccaagtgtttcttccaaccttcatctttctgggattcttcatatttgcagcaatgttcggtcgttatattactgtgaatattgctcaatatctcgtctctattgctttcatgttttccccaatctgctcaccattttcttatatcctttttgttcctcattacctgaatgtgataaccggaaacaagaagccggccgaaaatcgtgcgacggatatgtgtgctgttagagcattcaagaatccaaatgtctctgttacaatgactaatgcataa

SEQ ID NO: 558 - DNA, 963 bp, Caenorhabditis elegans
atgctctaccaactgcttcatactgtgctctccgtcgttggagtctcattgaacgcgttcatgatgtatctggctctcacaaaatccccgaagatcatgcttccatgctcggcaatcatcacgatcaagaccttcacggatatcctgacatcggctatgagcttctttgttatgcaaagaatcgtcaccgacgggtcctcaatccacgtcatccccaccggaccatgcactcacctcggaccaaccgcttgttatattggtcacatgttcatgctatgcttcctggagtgcaacctgatttggatgatctcttcctacatcttccgttactacatcctctacgtccgtgatccttccatcaagagtcttgtctttgttgcaatctgtctctccatcccttccttcattcatatggctacttggattagcaactacgacccagctgttgccatcgccatccctgaaaatgttggaatagaagctagggatatggtacttggaggtaaaatcgtaacatggtcggcactcactcttataattcaactcttcatcacctcaatcctagttttgattgcttatgcctggatccggaatacacttttaagttttgcagtcaagatgggatctgacaaaaatgatgttaagaaattgaatacaagacttgtcaaggtgatcaacttccaagtgttcctcccatccttcattttcttaggagtattcgtcttcgtcgggatgttcacccaactgattgatccaaagatctcccagtaccttgtctcagtgtttttcatgttctctcctatctgctccccattctcatacattcttttcgtgccccattacctaaatgttatcctcggaaacaagaaagtgtccgaagcaaaaagcacaacggaaggatgcacattccgacatgtgaacatggcagcttccacttcaaatacccctgaatgctcggcttaa

SEQ ID NO: 559 - DNA, 975 bp, Caenorhabditis elegans
atgatctatcagatcattcactccgttttatccaccgttggtgtttcgttgaacgctttcatgatgtatcttgcactgacaaaatccccgaagatcatgcgtccatgctcggcaatcataacgatcaagacaggaacggacatcctggcgtcgataatgagcttctttgtgatgcagagagtcatcaccgacggctcttcaatcatcgtcatcccaaccggaccatgcaccaacttcggaaaaaccgcttgctatgtgggacacatgctcatgctttgcttcttggaatacaacctcatctggatgatttcctcttacatcttccgctactatatcctctacgttcgtgacccaccaataaaacacctggtgtttgttgcattttgcctttcaattccatccatggttcatatggctgcttggttcagtttctacgattcaaacgagacaactgaagatttgtcatcgtatggaattggatcaggtgaaatggctcttggtggggaagtcgtttactggtctgcaatcactctcatcactcaactattcatcactgcattcttggtcgtcgtggcttacatttggatccgcgagacgctctgcagcttcgcggtcaagatgggttctgtcaaaaaggatgtgaaaaacttgaacaaaagacttgtcaaggttatcaactttcaagtgttcctcccgtcattcatctttctcggagtgatcacttttgcatccatgtttaccagcaaaatcagctatgagtatgcccaatacgccatctccgtgatcttcatgttctccccaatttgttccccattctcgtacattctctttgtcccccactaccgcaacgtcatcattggaaagaagaagcaaccgaagcctcatccagaaatgtgcggccccattagaagtaacaccagaactaccagcatctctgtgacaaataattcaagtcatctctcttccgcacattaa

SEQ ID NO: 560 - DNA, 1020 bp, Caenorhabditis elegans
atgttcgtcgacatttacgatcaactctacatttcctatgcggctgtagtctctacgcttggaattatttttaacggttttctactttttctaatatttttcaaaagtccatcatgtttaacaccatatactgtattcttggcgaacacctctataacgcagctagggtattgcatatgtttcctcttaacagttccaagagttatatcgattaatctacggatcgttaacatctacctcggtttttctcaattcttgggtcattggtggagctatatgatttttactacaatgttacacttcgctgttaactcatttctctcaattatgttgtcaatggtatttcgatgtatttctctcaaaacccttcgatttccaacatctggagcatttgccatgtgtatcctcgcatatatgattccattgagcatggttgtctcgatacggggcattgaaatcacctcgaattttacaattaatagcaagtacacattatggcagttggaaaacctggataaatataggactgtggtgggaaccactatggcgcagttatcaactctatgggtggcctgctgcgttagcatcttgtgcattccaatatacagtgtcatgttttggtgtcgatatcggattttgagaatgttggagcgtcccggatacatgttcaacacaactacaactttgcaaattaagagattggttaaggctctgactgtccaatctttgataccagtattcaccttgtttccagcgtccctcatattcttatcaacccaatttcatgttatcgaaaccaccaaatttggatacataatcatttccttattgagcttgagccccacaatagacccattggtaaccatttactacgtgcagccctatcgaaaatatatcgtggatttgctgtggtccgaggagcgtccgatggtgtctccgtttctgtcgaataatgatcccaggttctacaggagtcgttccaatagtgttttgatgatgagaaatacccattttgtgtaa

SEQ ID NO: 561 - DNA, 1029 bp, Caenorhabditis elegans
atgccaatcttgaggtctgttgcagctgtgctagctccattcacttctgatacttacatgaatactgccgacagcatctttgtgattacggtcactattttgacgtcgattggatttttattgaatttgctcttgttgtacttgattatatggaaaagcccaaggaatttgacgccatatcgcatatttctggcgaacaccacaataactcaattagtttatgcgttatttgcggtcactagcatgccaagggttcttgccaagcatcaatacactatagtaatctacctgggacccgtgcaatttttcggcgaatggttcagctacatgtcctacgtgggaatacttcacctatcgctaaactccttcatctcattgatgctctcaatgatctaccgatatttttctattcgattcaaaagattcacagcgaacacttcaataattctgtgcattattggctacttctttccatttctcatatttgccagttgctcgaatattgccatttcgtcgtcattgtcattcaacacggcggttcttgacggaatggttgagaatctggagagctatcacatggtgctcaccaccgaaatttccaatcatccttctctaattattctgacgcttgccgtgacctgtggtcttgtgcctatttattttgtgatgtattggtgtcggcaccaaattcacaagacgttgaagcagacgagatccgttcatagtccgtcgacaagggataatgcaaggagattagttcgtgcactaacaatccaatcaattattcctctggtgtccgtcttccctgcatcaattttctggtgtctttcccagttgggatttgtggagcctacaatgtacagctactttattattccgtgtctttctttgggatgtatagccgatcctgtagtcactatcagatgtgtgctaccgtatcgaagatggattttgaaattgtgtaatatgagtactaccgacatgattacgtcgaatcaagacaagagtactatatttcaaaaacattaa

SEQ ID NO: 562 - DNA, 963 bp, Caenorhabditis elegans
atgatttcggcggaagactatatttttctgagttctattttttatcctgtatcttccacgctagcggtgtctgtgcaattttttttattatacctgattgtcaagcactcccctaaacacttgaattttcttcgagccactttagctctaacatctgtttttcaaattattcttataatcgtaacgtattttacacaagttcggtatcagactactaaaactccaatcgagatttggacttatggctactgcagattttttgagccatggatatgcaattgcttttaccaaattatgcagttgagcgtgttggcaagtcatcttacaatttacggaacttttttcctcaagtacagaatggtcacaaaactacagatgagccaagttgaaattatgaaaacgtatgttgtgttctattttcctctcattttatccacaatatttgtcgtaatcattttcaaaactcaagtgtggacggtacaagcggaagaagaactccgcgttgtgaacattgatgggaacaatagtagaatgtatctaatctttgcaatcttgaactactcacactggccaaatacgtcaaatctcgtgatttacggtgcatgcttattggcttctcccgtcatttgctttttctacaggaagaatactctgaaacatatcaaaaaccaagctggaaatatgtctattgcttgtcaggaacagtacagaagcttcatattgggtctcactattcaatgcattcttccttgcgttatttttattccactagaatttttgtattactactgtatcatcaccaaaaacgagcttttgtttgtggagttcttttttccagttatagttgaactaccggccatgattgacccttttatatcaatttattttgtgacaccatacagaaagttgattatcaaatgggtgcgaaaaagaaaaactctgcatagaactgatactttctaa

SEQ ID NO: 563 - DNA, 975 bp, Caenorhabditis elegans
atgttgacgaatgaagactatctcagttttttgagtttgttcaatccggtttttttctgcacttccgttattctacaaaccatttggcttttgttcattatcttccactctgcaaaaatgggaatctttcgattcatcatagcacacacaagtgtctgcaacattgcttgtctttgtctcgttgtgttgttccaatttcggcaggtgtcctcaaatgttccggtggaggttcgaagttatggacctcttcgaattcttagtacgttgactatgtacacgtgccatcaaatatttcaactgactatattgttgagtggtatatcattgattgtcacgctatactttaaattgatgacattacgttggacgaaggtttcgagcataacaatgatactgacattcttggcatttcacattccattttttctttcaacaggctttgtaatatatctaattcttaccgtcgcataccctcaagagattcaagaggaactagcactcaaaaatgcaaacgccacggagtattccatcgttggtctaatgaaacttcagacggtcagtctaatgcaatttgctcttgttgtcggtggtgtcgtactttctccatttatttgttttggaatcagagcaagaattttgaatcttctcaacaaacacctggacgcatcatccagaaccaaaactcaacacaaatcatttgttctgggtcttactattcaatctgcaattccaactttcacttacttcccgatgtactgcatgtatttttattgcgtcactactaaaaccgaaatcctctttcaacagtacttcatctacttggcatccgcacttccagtgttcatcgaaccaattgtcacgctttattttgtgattccgtatcgcaagaaattgttgtcatgtcttgggaaacgagacaattcagttggaaccacgatttcggtgtcttcaggcattacacgatccagaatataa

SEQ ID NO: 564 - DNA, 825 bp, Caenorhabditis elegans
atgggagcggatatttatcgggatgtgctttatatcttctaccctattttcttcattttttcaacaataacacagttgatgttaatttatttaattttttaccactccccaacacatctaaaaatgttaaaagtattcttgttaaacacaagtcttttccaaattatcctagtcgttgtttcttgttcatctcagtttcgaatgattacaactgctattcctattgaactgagaagttacggactgttaagatatttggaagcgtggctgggttatacaatgtatcaagttttacaagttatggaagtgataatggtgataaatcagtcgttgccaaatgaaatcagagaacagtacaagtttctcaatgcaaacgccgaagagtactcaatcgttggagcgcttagcctgaaaacagtaccaagtctaataaattttctgttaatttctggatctgtagtagcctctccgttcattagcttcttttttcgagagaaaattttacgacgtatcaattcacagttttatcaacattcgaaatggaaaaagtctcaaattcaagtttttgtgaaaggacttacaattcaagcatttcttccgctcatattttatgtgccagtatttggtctctacttctattgcattttaactcatacagaaatactatttcaacaatattttatgacagtggtcccttgcttgccagctttttttgatccaatgctgactttgtattttgtgacgccttatagaagacgactaaaaatttggatgagaattgagaaagaatcaaaagtgctaccagtcacatcgcttgtcaagtaa

SEQ ID NO: 565 - DNA, 975 bp, Caenorhabditis elegans
atgccctctagtgaagattatcggcaatttctagaagtgttctatccattttttcttatcacgtcactgattagtcaattatttgtgatttatttcattttgaactacactccaaaacagttacaaacactgcggtatatactagtgaacacttgcgtttttcaagtaatccacgtatctgcttgctacttgatgcagtttcgtcaagtttctaacttagttcccatggaagtatggagttatggatatggccgacatttcgaagcatttgttggttattcattgtatcatgttgtacaaacatcaacggttgccagtggcatttcagtagtaatgacgttgttcctaaagtacgaagcagctagaaatgtaaagctcacaagttggaagcgatatttgataattacatgtatccttttaccattagtcacttctgtgacactggaaataattcttataatcacgcaatctcttcctaatgaaatacgtgaacgctacaaacttattaatgtcgacgtcaaagatcattcggtagtaggaactttgaattttaaagttcttgcaagtcaagttaatgtatgcataatgtcatcgtctgtagttatgttgccaattattgggttaagctctcgaaggaaattactggagcatattcagaaaacaagtgatagagtgtctcagaccaaaaattcacagaataagatgtttgtgaagggtgtaatacttcaaacatttcttccattgtgcttctactgccctatatcatccatttatttctactgcatagtcacacatgaagaaatcctcttccagcaatatttcatgttcttgatcccagcatttcctgcattattcgatccttatatcactttgtattttattacaccatatagaaatcgtgtaaaaatttggctgcgcatgaataaggtgtctccaaagtctgttacgttaataaatgtaaattgcaactattaa

SEQ ID NO: 566 - DNA, 963 bp, Caenorhabditis elegans
atgttccgtgcgattctttccgttttcaatccactggtttatgtacttagtgtttgttttcaaacaactcttatatatacaattattcgtcattcgccaaaaaacttatcaactttaaaaatcattctattaattaattgtttctctcaatcaattcaatcgtcaatggcttttattacgcaaatacgatatgtaagtaatcttgttccattgcaactttggagctacggaccatgcagacattttgaagcgttcatttgttactcaatgatgcatgttcttcaaacgagttctttgataagtggatggacagttttcttaacaactttcatgaaatatcaagcagcaaagcacgttgttcttccaaaaaagaatatttggattgtaatttgtgttatttttgcaattatttcggtttcagtggcttgtgaaatatatctgatcattattcaagctctacctcaagatatccgcaagagttacgaatctattaataaaaatttagaggaatactctgtgattggaataatgaattactcctttttacctagttctattaatggtgtaatcgtgaatggattagttgtagttgtaccaatttcatgtctaacgttaagaaggaaaatattcaagcttctcagtggtcctaacaagtcttccgatactttgtacttgcaaaaccggatttttcttcagggtctcacttttcaaatctttggtcatatcctggtttacgttccgatttacatttgtacattcatcagctttatcacaaaaacagaatatacattttcacagtttttcatcttcgttcttcctagtctaacaacagtcgtggacccagttatcacaatgtattttgtgacgccttataggaagaaactgttgtgttggatgcgttcagcccagaataaagttttctctgcatctggatccacgtttgcggtatctattattaattaa

SEQ ID NO: 567 - DNA, 963 bp, Caenorhabditis elegans
atgtatcgtgaaattttaacagttttcgatccacttgtttttattgtcagtttatgttttcaatcaacacttatctatacaattattcgtcattccccaaaaaacatatcaacgctaaaatcgattctactcataaatagctgtttccaattagttcaatcgtcaatggcatttttctcccaagtgcggtatgtcagtaatcttgttccattggaattgtggagctatggaccatgtcgtcactttgaagcgtttatttgttattccacgtttcatgttcttcagacaagttctttgataagtgcgctgacagttttcttaacaactttcatgaaataccaagcagcaaaacatgtacatctttcagaaaagaaaacctgggttgtagtttgcactattttagcaattatattagtttcaacaggttgtgcaatatcgctggttattatgcaagctttacctttggaaattcgccaaaaatacattttgataaaccagtcccttgatgaatactctgtcattggaatagtagattattcggttttacccagtcgtataaatgctacaattgtcaatggtttagtcatcattttaccaatcacatgtcttttattacgaagaaaaatactcaagcttctcacgggacctgatagatcatccgatgcgttacattcccaaaatagaattttcattcagggcctcactttgcaaattttctgtcatacgctggtttacgttcctatttttgtgtgctcatcaattagtctggtgacaaaaacagaatacattttcccgcagtatttcatatttgttttaccgcatctaacaactgtcatcgatccggctgtaacaatgtatttcgtgacgccgtatagaaagaaattaataatttggctgcgattgaaaaacaataaaatgcactctattgcgcattcgacatttgtagtttcagtcaaccaataa

SEQ ID NO: 568 - DNA, 951 bp, Caenorhabditis elegans
atgtacagaactgtcttatcggttttctacccaatgtttttcatactcgttattccaagtctaatattgctaattttcattatattacgatattcacctgactgttttcaaacattcaaatatattttattagttacttgcatttctcaaatagttgcagtcactacaaattgccttattcaaatccgtcaggtttccaatttaacccctatggaaatttggtgctatgggccattgagacacttcactgcgttaattgcttattctacttattttctcacgcagactgccgttgtaattagtaatgtattaatatttttaacaatttatttgaaataccttgcaacaaaaatcaacacaagaaaaacctgcaattatggcgttacatttttcattttatcaccaatttttatagcactgggtgcacaaactagtctcatcctaacggaagggataccatctgaaaatcaggaccatcttgaaaaaattaattttgatatctctgatcatgcagttattggttacattcgtttgaaaactctacccagcattataattacatttgtgataactggaacaattttaatactgccagctgtgggattattattgaggaagaaaacgctgcgcaacataaactcaaataagttctccatcaccaagaaagctttaataaaaggttttattaacggtgtcacactccaagtgttcctcccattaatttgctacattccggtttttggaagttttcttgtgctagccgaaacaaagacggaagttccttttgaacaatatttcttctcagtattggttatgttaccaatgttatttgatccgtacattatactttactccgtggctccttaccgaaagcaaattgaaaagtggataaagacaaaaaggcgccagtctattttgattgtggatccagctgcaagaattggcttttaa

SEQ ID NO: 569 - DNA, 1014 bp, Caenorhabditis elegans
atgaaagaagtagacatacttgccttcatcaatgttgcctatccaatttttgcaatcagtgttctcttctcacaagctttgttacttctgctcatattcaaaaatcaaacaaaacttttacgaacaatgcgaatttatcttttaaatatatgtgccgcccaagttgtaactataatttcgggatttctaacgcaatgtcgaatgattccaaatcaaacaacagtggcatttgtatgtacaggtgtatgcatcagagttggaagacgttcgtgttttctactgcatttattaagagatgcatcttcaatggttgcactttttgcaattgttcatgtattctactatcggtataaaatcttatcccatcaaaaactttcatcagtccaaataatgagaaacttcataattgtgcatctacctgctatattctgtgcaatctgtcaatttataaatccatctcagcacaatgcaattgttttggaaactcgtgctctgcatccgtcgtatatttttgagcaaaactcaatttttgggttttcagcgttgacgtctcctgcagtcaaagcatctactattattttcacaattgttttagtattaaacccactagctgcaattatctatcgcaacaagatatggggacttttaaatgaatacgaagaatacaaatctccacgaatcaaacatgcgaagagtatgatcacgggattgacaattcaaactttaattccaagtatttgttttgtaccattggtcgtacaattctttctcacacaatattcggaagctggtgtgttaatactcgagtacttcaattcatttctggtaattctcccaactttgatagatccaattctatcaattgtatttgtaatacctttcaggcgaatgttcttcaaatatcttctcgcagttcgccaatgcaggttcagcttatcaaaattatcagacaatgacataatgtctaaaggaaatgggtattctgcagttcgggcggtatcaagaaaaacgtaa

SEQ ID NO: 570 - DNA, 981 bp, Caenorhabditis elegans
atgatgtcggccatggaaactaatatggtcttgatcttgacgatattttataatgcgtatttcttattggcaatttcttcgcaacttttattactttatcttatgttgaaatgtcaaaatcgatcgcttcatgaaatgcgaatttatttatttaatatcctgggattacagtttatatctacatttagcgcgtttgtactacagtgcagaattgtgccgagttctggaacagtagcaatgttatgctatggaccatgcaagtatctggggaacatagtatgtgaagtactattccatattcttcaaacttctttaaacgcgtgcgctacggcattgataattgcattttattatcgatacgaaatgcttacaaataacagtttcacaagaagtggtcactataagcaactggttattagctattgtgttccactggtttttctaatatgcgaagttctttctccaaatgatgttaacaagctggttgccgaattaacagttttacacccaacctatggtcttgaaaactatgccattcttggattttcggatgttaaaactgttgccgcatcatcgcagactctaatgctaatgataggactttacggtactccatttattgcattggtttttagaaaaaaaataatcaaaatccttcattcgtcgagatcctatcacgctgaaaagattgtgcagacaaagagcatgattcagggactcactctccaaacattgcttcctttaatctgctactgtcccggattcacgtattacatatattcacagtatacccaatcgtcaagtcttttcgtagaatttgcagtcagcccatacggatttgtctatacaatttttgacccacttcttacaatttactatgtgctcccgtatcgaagaacttttaaagcaatattttcaaaacataacagcacgacaagtgcgacttttgtccattcagaaacagctagacgggtggcctaa

SEQ ID NO: 571 - DNA, 1011 bp, Caenorhabditis elegans
atgtcagaagttgaaaagaaattggaaatgtttgtcaccgtctactattcattaaacgtcacattagccctttcaatcaacattttattgttattcatcatgaaaacaaccaaatcgtcattgctcaaagatatgcagtattatctgttcaacactgctttgtttgagataatagtcagcttatcaacctattttgcgcaatgcagaccggtagccaacaaatcaacattagctgtattttgccacggaccgtgcaaatactttgggaagaatacttgctttgtaacatttgctgtagtacaatgttccgttgtggccgcaagtttttcaattcttttatcattttattaccgctaccgactcctcaaagtgaatttcaagaaaaaacacaaacatgcgactaccttcattatattttcgtttttccctacggtaatgttgctattccaactcttgactgatagcaattttgcaatcgttgaggccgaaaccagggaaatgcatccggactatgattatgtgaataatgcactgataggcttctcagattcaaaaagcccagcagctattattgcacagtcgttgatctcgttaggggtgtatatgtcaccgctgattgcgtttcactacagaagaaaaataaacaaaatactctcaacaaacactggtcaacgaataccggttgcatattgtaagcaattaataaatggactgctcatccaaacccttataccattctgcgtttatatccctccatactcttactttttgtactctcaactatcaggtcactcaaatctctattttgaatatcttctcaacatattcgggtcattcacggcattcatcaatcctttgctgacattttattttgtgctcccataccgaagagcattgtgcaagaaagtgttcaaatattttccatcaatatcagaagagggcactgaaattaccactttcccgactactgtgcagtttcaaagaggacatacggcatctaccaaattttaa

SEQ ID NO: 572 - DNA, 1011 bp, Caenorhabditis elegans
atggatctttttggttcaagttcgaatcgttttgttccaataatcaacatctactttcatttctaccttgtttccggtttattttttcaatgtattctgatgattcttatcattcgaaagtctcccaacagcttgaatgacctcaaactgtttctatacaacacggcgttttgtcagattgcaaacattctttctgcttattttattcaatatagggcgttacccaacacaacaactctagcggttctggcaaatgggctgtgtaggaaattcggaccggaagtctgttttggaacttatcatgtttatttgggtatcagctcaagtgtagctctttccatttcaacaaccgttatgtttcgatattctctaataaaaaactggcgtttaagcagaacatcattacgtggattgattatatgtggacatattgcgccgttcattgctacagccattcctttcacgacgcaatgggattttgacgttgttcgtgcacaatcagtgaaagagcattcaacatatgatctttctatttatgctccattttctggattttctgatacaagatctttccaattcttgtttgtcactgcggcaattgctattggagcatactttgtccctttaatgtcggtttttgttattcggaaaattatgatagtgaccaaagctcattcaaaaatgtctgaaaacactaaacgtcacacgaggatgttaatgaagggtctggcgtgccaagttttgctcccattgatctcttattttcccatcattacgctttatttggtcactcaaatgacagcagaagagttccttataacagaacatcttctgaatattatgacgtgtttccctgcactcgttgatccttttatttcattttattttatagtaccatatcgggtagcactgttaaaactggtaaaaaagaaagtggattcaacaatcgatgtgacaacatacataccaccaccagtttctttccgtcattcaagcacaattcatggctaa

SEQ ID NO: 573 - DNA, 1005 bp, Caenorhabditis elegans
atgacaagtttatcttcaaatcgtattgttccatttgttgatatttatttcaaaatttatttttatggcggtctcacttttcaattacttttgttaactcttattttgacaaagtctccgtctattttgacaaatctaaaattttttcttattaatacttgctttttgcaaattattttgatttcactgggatttttcacacagcatagaagtctaccgaatatagattcatttgctgttttgccacgtggaccttgccgagaattcggaccagatgtttgcttctcagcatatcattttttcttgggtgttgctctctgtgttggacttggaatttcaaacacaattattttcagatttcaagctttacgaaagggcagagtatcacgtagtagaatatttacaatgatatccctgacgtatattccttcatcaataactattattcttccattcacatcttcttgggattttgaaaaagttcgttcactgacttacattgagcatccaaaatacgatctttcaatctacgaaccatttgttggattccacaacatcgcatcatttcagtttactttagctacactccttctagtaatcggagcttacgctatccctgcgatttcaggatttctaacttcaagagttattcatttgatcaacgataacagaggcatgtcgttgaagaccaaggagcaatcaaaaacattggcttacggacttgcgtgccaaacatttttacccgttatttgttatattccagtagcaagttgttatattttttctcaaatgaccagtgtcgagctgcttttgaatgagcatcttcttggaattttgatctgctttccatcattcgttgacccatttatatcgttttattttattgtaccatatcggcaagctctattgggattatttaagtgccgaaaaacaaaacctttaaatatcgttatcacagttcgtcatctatcaaaacgtaacccatcaattgttgattcaaactaa

SEQ ID NO: 574 - DNA, 978 bp, Caenorhabditis elegans
atgtgctcaaactccaattgttacgtgccatttttcaactggtactggccattctgtggagttctcgctatcatatttcagactattctactccatttgatttctcataaatcaccagcaacactcgatggtctcaaaatctttttgtacaacacatcttgtgtacagattgctttgataacatttgcattcctatctcaacacagattacttacaaacagcatcagtgcagctgttctatcattgggtccatgcagttatgttagcccgacaacgtgcttcataaattatcacgttttcatggccacaagttttggagctggaagtgcaattgctataactgttctcttccgttttttcgttcttgtacaaaatcaagtacatacaaatcaaacgtatataatggtgttggcatcttatattgccccacttgtagtattgataattccatttactgataaatgggactttgaatctgcccaggcatccacagccctggagcatccttcctataacctgtccatttactatccgtactcgggattttcaaatgctggaagtcctcagtttctgtcagccacccttctcctatcaattggtgcatacggaattccgatcggctgtctcattctgactcgaaaagttttaattttgattcgttatcatagtcatatgtcggaaagaactaaaaaacaagcacaaactctaattcatggattaatcgttcaatcaatgcttccattcatttcctacattccatcattttctggttatatttatactcaatctactggaagagaactcttgatttgtgaacacctgatattagtgtcatctgcattcccagctctccttgatccattcatctcgttttatttcattgttccataccgacaggcaattattgaatgggtacttccaaaacgtcaacagcgaatcaccacagtcaccagcaattcaacttccggcttcaattaa

SEQ ID NO: 575 - DNA, 1023 bp, Caenorhabditis elegans
atgtccaaaattctagatgacgtggcggcagtttactatccgatatacttcacaagttgctcaattctccacattctattattctacctaatatttaataaaacttcgaaagttttgagaacgatgagatatttcttgtatccgtcgaactttttcaactacgttttagcggcgttcacctttttcctgcagtttaggacagtccataacacccgttctctggcgataatgtgtcagggtccgtgtaaatattttggagccgtttggtgttttaatgggtatatttttatactgtctgtggcaactgccggcggagtactaaacattcatactttgtactataggatgattactataaaatatcatgataatatgaaatttcgaattttcatcttcggactctggtatttgttccctattgcgattattgtcctctcctacattcccccaatcgacctggactctgtgtacctcgagacattacaagctcacccggactataattttgagccctatagaaaattcggcggatttgcgaattctcacagtattttcatgacgctcgtcacttttacactggttctgctgaccattgtcgcgccgacgcttggctattcttggagacggcaaacgctaaaagttttggaccggaatataaattcgctttccgcacaaagtgtgacacagttcagagcactggtccatggcctcggactgcaaattatgctcccgctgttttgttatgttcctgttgggtttttctacattttcaataaatatgttggaactcaaattctcatctcccaatacactgtatgctttatgataactttaccagccctattcgacccgattctacaaatttattttatagtcccatatcgcagagccgccaagcgaattctgacctgctcaaggtcggagagaattgagaataatgaaaattcacttcgtcgaaacacggtgacattgtggaatgggagaaagacttctagtcctaaccaaatgcaaaatttgacctaa

SEQ ID NO: 576 - DNA, 984 bp, Caenorhabditis elegans
atggaacccctgcaaacaatttctcgagtctattggacaatattcttttctatttgtctgtgtcttcactcttcaatgttccttttgatctactaccgcacaagtcgaaccatcagaaacttacggtggtttttatatccttcgaacacggcctctttcgtacttgctacagttgcttttatattgcaggttagaaatgtcaacaacaaaatctcaatggctctgctttgtgatgggatttgcaagttcattggtccatggttttgttatcactgttacaatttgcttttaactatgatcactgtaaccggcctgatcaatctacacacgttgtgttaccgtacaatgtgtctaaagcattttgagactcgaaaatctaatcgggcatcgctgaagttctcgctgcattatttgataccgatgaccccacttattctcacctactttgccccaataaaccacgcagatgtctacatggaaaccctgaacctacacccaaactacaactttgaaccttataaaaatttcggtggattcgccaattcccatcatttttgtatgaatttcaacacagcgatttatgcatttaatacaatttattttccaataattggcaattattggaagcgtattgctatgaaaattctcaaatctagcatttcaacggcatcatcgaaatcgacacgagttatgagtgaactgttggttaagggccttaatcttcaagtactcttaccacttatctgctatgttcctatcagtatacttttttgctggaataaatattctggacaacaaatcgagatatcacagtattcgatcgcgtttttcggcactcttccttgttttttcgatccactgctccaaatctatttcatactaccctatcggtctgcggtccggagattaattttctgtggctgctcagcacaaaccagtgtggcgaattctagtccgaatcggggaactatactttctgtttaa

SEQ ID NO: 577 - DNA, 966 bp, Caenorhabditis elegans
atggacttcttccaatatttctttcgttactactggcagttggtttacatgatatgcttgatgttgtacattacaatgtatatcttaatctataactttacggggaagactttacaaacagtgaagtacttcttatacccttcctgtactgcgatgctgatcgcgatgacaatggcgtttgcaacacagactagaaacatagacaatacacactccatggcgcttctctgtgatggattctgcaaatacattggccccacattctgcttttattgttataacctttatacggcttttggaatagttgtgaatttgatcaacctacacacaatgtactaccgtactctgtgtctcaagtatctcgacgcgaagaaggttcgattgtggacgttggtattcatgtggcattatttgtgtccattgatctacttgatagtaataataacttcaccgcaaaggcacctagaagtcagcatggaaactttatccctccaccctaattttgactacacaccttatttaacgtttgggggattcagccaagctcagaaagaacttcttgataaagctgcaatgagtttgtcactgatctcgatgtattatccactaattggtacttattggaagcataaggcgatgaaaatgttgaaatcacacatgtcaccaaacacgtcggatgcaacgcgagcgatgcttcagacgttgataaagggcttgaattttcaaatccttctacccatgctacgctacataccactgacagctatatatttcatgatcaagtacacaggagaacaatttctaatttctcaatacacaataacagtgctgggaacaattccgtgtatccttgatccacttgtacaaatttattttattcgagatgcgattcgaaagtttttagcatgcaactcgagcccagttcgaaggatttatgacagttgggcttccagaatgataatttaa

SEQ ID NO: 578 - DNA, 960 bp, Caenorhabditis elegans
atggatttccttcaatacttcttccgcttttactggccaatgttctccctaacctgcctatgcctattcatcaccttgtacattctaatctacaagttcaccacaagtattttgaaaactatgagattttttctttacgcgtcgaatacagcgactctgatttcggttgttttggcgtttgccacacagaccaggaatatcgataatgagcattcaatgggtctgctttgtgatggattttataaatatattgggccgacgttttgtgcgacttgctatagtctttggagtacttgtggaataaccatgggtttgatcaatctccacacgctctactaccgcaccatatgccttaaatccttcgacccgaagatgatcaaacggaggaacctcctatttttctggcattacctagttcccctggtgtatttggccataaagttcatcccttccccggaccatctggcagttcacaatgaaactcggacccttcacccggatctagattatactccctatctgaatttcggagggtacagtcaggctcaaaaagtcttccttgacaggtcggcgattgttacacttattgctatgtcgtacttcccaataattggtagttactggaagtatcaggcgatgaagcttctgacgcctcacatgtctccgaatacatcggagactactagggacatgtttcggaagttgattcggggattgaactttcaaatttaccttccattgctcacatatgtgccaatggttttcttgtttctagcgattcaaatttctggccgtcaattccttatcaccctaaatggcacaggttcctgcctttttgaccctattgttcaaatctacttcatcacgccctaccgagaagccgtcgtgaggtttttggaatgcaggccggtgcgatttcggtccaacgttgtaagttgggcttctcgtgtgattttttaa

SEQ ID NO: 579 - DNA, 978 bp, Caenorhabditis elegans
atggacattctccaatacttgttccgcttctactggccaccgttctacctactcagcttatgcctgttttcaaccatgtacattttgatctacaactttaccaccaacgtcttaaaagccatgagatattttctctacgcttcatgtacggctacatttgtttctttaacattggcgtttggaacacaaacgagaaatattgataatgagaattccatggggttgctgtgtgatgggttttgtaagtttctcgggccaacgttttgtgcgacgtgctataaagcatatgcgacttctgtactaacagtgaacttgatcaacttgcacactctctactatcgcaccgtatgtctgaagttgatcaacgcccaggaaattggccgtaacaccttgattttttcttggcattacctgttcataatagcctatctgacttctaccttgattcctccctccgaccatctggcagtctacaatgaaacgctagcccattaccctgagtatgactacactccgtatctgaattttggagggttcagccaagctcaaaaagtttatctcgataattctacagtggctatgttccttgtcacgttgtattttccaatgatcggcagctactggaagcatcaggcgatgaagcttcttaaacctcatgtatccccaaacacatcggacgctacacgtgttatgtttcggaaaatgattattggcctgaactttcaaatctttctgccgatgcttagttatatccccgtagtgtttttatttattctgattcaagtcactggccatcaattcctgatctctcagtacacaataacctgtctaggagcacttccttgcttcttggatccaatttttcaaatttacttcattacaccgtacaggaacgctgttcgggctttcttcgtgcggaagccgtctgctgatggtagttgggctacaagagtttcagcagtgaacagtgttgcttaa

SEQ ID NO: 580 - DNA, 972 bp, Caenorhabditis elegans
atggatcccagctactacttcttccactattactggccaatttatttcttgttgtgttcgagtctgttcctggctatgttcattcttatctacaactttaccacaccaattttaaagccaatgagatttttactctaccctgccaatgctgcaatgacaatctcaattccatctgcgtttgcgatgcaggcaagaacattggataatgagcattctcaggcgttgctgtgtgatgggttttgcaagtacattgggccgaacgtttgcctgatctgccaccagttgtggacgactttcggaatgacagcttgtgtgattaacctgcataccatgtactaccgtaccatctgtctcaagtacttggatccaaaaaaagctagatggtggacgttgttgtattcggtgcattatatatttcccctaggttcacatatcctattgatattcaccccttcaagccatgaggagatacacaacgaaaccttacacctccacccggaatacgactacaccccttacttagactttgggggatttgacgccttccaatcaatttatttgggaagagctttgatgatggcaattgcaacgttttattcaccaataattggaaattactggaagcatcaggcgatgaaaatgttgaaggttcatatgtcaccgcagacgtcacctgctgcacgtgcgatgatacagactttgatgaagggtctgaattttcaaattctccttcctatgatcagttatgtgccgcagttcttgatggtactattcaaaaagtatactggacaagaattccccaacaaacagtacttgggcacggttctaggcgcgttgccttgccttcttgatccaatggttcagatttattttataactccctatcgaaactcgattcgcgagtttcttgagtgtaaatcgatgccacgaggaagtacgagtggcagttgggcttctagggttattacttaa

SEQ ID NO: 581 - DNA, 975 bp, Caenorhabditis elegans
atggaattcgtctattacttcttccactattactggccagtttttttcatgtcatgttcgagtctgttcctcatcatgtttttcctcatccacaactttaccacaccacttttgaaaccactccgattttttctctaccctgctaatgccgtaatgatgatttcaattacaatggcgtttgttatacagtctagaacagtggggaataagcagtctacagcacttctgtgtgacggaccctgcaagtacattgggccaaacttttgcctacactgctaccacttgtggagggcatttggaatcacagcttgtgtgatcaatctacacacaatgtactaccgtaccatgtgtcttgtgcatttggattcgaaaaaggctcaccgttggaccttgttgtactccgtgcactatatattcccatttagttcacagatcctaatgctaacggctccgtcgaaccacgctgcagtgcacaacgagaccttgatcctccacccggagtacgattacattccctacttggattttggaggatttgaccccacggaagtagtttatcaggcgaggaactggatgttcacaattgcaacgttctactcgccagtcattggaagctactggaagcatcaggcgatgaagatgttgaaggttcatatgtcaccacaaacgtcgcctgcttcacgtgtaatgttacgtactttgatgaagggtctcaactttcaaattctgctgcccatgatcagttatgtgccgcagcaactcgcatacctttacaaacaagtttcaggacaggagttcccatactcccagtacgctggaacattcctgggcactctgccgtgtttgctcgatccgatggttcaaatttactttataacaccttatcaaaacgctgttcgtcgatttctggagtgcaagacgttgccacgtggctccccaagctacagttgggcgtctcgagttgtgacaagctaa

SEQ ID NO: 582 - DNA, 972 bp, Caenorhabditis elegans
atgggtctcgacacgatattcactgtttactacgcattttactttatattttccggaaccgcgcaactttttgtgctctacctcatcgtgttccatagcccgccgagtttacaagatatgcggaaattaatgatggctacgtcactatcgcaagttatcatgtgctcgtcggcatttttgacgcaagttagaattgtcccgatccaattctccatcgcacttttatctttcgggccttgttcaattgtaggcccgcaggcttgcctggccacgtataatctgttgaacacatcaggttgcctcgtggtggcctccctcctccatatgatgtattaccgccgacgtttgatgtcttctgtcagaaggctctcgacacaaaagttcattggcaattgttttgttgtctacttttttagcgctgttgttctgattttctcattcctcggccccaccaacttcgggtacatcaaagccctggtgacaacgttctacccgacaattgacttgcaaaactacacgctatccggcttctctgacgtcacaaacattctttgctcaactgcgacgggaatcatcgcagctcacgcgtattttccgccgctggtggcgattatttggagacgaaaaatcgtccgagaaatcaatagtcaacaatcggctttatccgccagaactcaactgcaaactcgacattttgtgcagtgtctgacgtggcaaacgtgtcttccgttgtttttctacgtggttccttatacattttatctcgtacagcaactttttggaatcggcaccgccatcaccgaatatttgatcttcccgctgaacacattctcggcggtagttgacccgatttgcatgcttcacttcatcaagccttatcagcgaaaggccaagcagcttatttcgaatttacttggcctaaatattgctcaaaattctagcacaattgcaacagtgtcttctcagctataa

SEQ ID NO: 583 - DNA, 972 bp, Caenorhabditis elegans; identical to SEQ ID NO: 582

SEQ ID NO: 584 - DNA, 972 bp, Caenorhabditis elegans
atggatgagagcgttgcaatgtttgtaaactactactacattgcctatgtgattttcgcgttgccattgaattttctattgattttcctgatttggttcaagtcgccggtgtctttcagcgcgtatagactacttctgctctacaccagtatcagtgagacttttctcatcgttttctcgtttttgttacaaatgagaatcatcagcgccggcgaatcggtcgccttggtaccatatggccctcttcggcatgcgtctcctgtgattgccttcataggttataatttttataatttatttctttgcaccacaaatctctcaatactattgtccatgtactatcggtactcgttgatttgtcacggaaagtgcgagaatttagcgttgagtcgaaatttcggagtaacgttggtgatttctgttggaatgctggtagcaattttaattcctccatacgacttccctacagtaaccctgaacacggaaagatcgtatcccaactatcacctattagatactttcggcgaatatggaggcttcaagtcgacaactcggctggtttatcttatcaataccacaattctcatgggaattccctacatgatgcccgttttcattctgtactggagacatcagatcttcaatcaaatcaacgaagttcagacacatttgagtgaacgaaccaagaaatcgtcgttggatttggtgagggcactcacaatgcaggcaatgttcccgatggtatgccttcttcccaatgttgcatacttccttgtggcgcagcgaatccacatcgagttcgagattgccgagttcgtgccgtttccaacctgcgtcatcccgtgcctcatcgatccgattctaacgatctactacgttgcaccatataggagttttgtgacgcggcggcagagaagtgtctcgattggggtgacgttgtccgtggcgcagtcttccgcgaggactatttaa

SEQ ID NO: 585 - DNA, 1038 bp, Caenorhabditis elegans
atgatatacatgagctggttccatacttggtctccgagaattttttgtgtactttcgtttattttcaatatcttgtttttagttcttttaaagtttaaatctcctcggtacattggtggatatcggtatcttctaatgacttttggagttttcaatttgataacttcagttactgaagcagtagtttcaacggcaatcgaaggatttaataattgtttgattatatttgtaccacatggtcttttatttgaatatccgctacttgctcagaaccttatttcaattcgatgtggaatgtgtgcgtacacatttgcactgcttgctgttcattttttatatcgatatcttgcagtctgcagaccgcttgccattgcccattttttccgcccaaaaactattttcctcaattccctatttgtaatgtgttttggaagttcttggatgctcatcggtcacataactatgtggcctgatgatcacatatatgatctaatcgatgaaaagttcatacaattccataacacaagcagtagagatttggcaatgattgttgcaaattatgagtaccccgtgtatgactggtcaaaaagtggaattctgggaatgctcatagccacattaatcaccacttctattatgatctcctatgttttctttgctcaaaaaattcacctgtcactgaaagcatgcacattttctggagcagtgaaaagattacattcaagtcttctcaaatctttaattgctcaaactataattccattgataagtacaattattccttgctttgtcatatggtttcttccacttggtggtgataattatggagtaatgctgtcaacatactttatgccactactcagcgtgtaccccgcaattgatccagttgttatcacttgttcattatcagattacagaaattctgcattgaagacattggggttccaacgagaagaaatcagtacatctaaacagccatattccaatatattcactgtaattccctctctaaacaataattatattaccccaaattaa

SEQ ID NO: 586 - DNA, 1011 bp, Caenorhabditis elegans
atgatttacattggattcacgcatttttggactccaataatatttggtactctttcttacttctccaactcaattttcatttatgttgttttactgaacactcgggcaaatattggggcatacaaatatatgctcgtttgttttggactctttgatattacatattcaacagttgacatgcttgtagccatgggatctcacagtgagggtaatacattctgcgtttttgtgactcacggacctttttcaaattaccttgatcttggattttttgctccttgtgtccgatgcatgtttttttcattaagctatggtgttctcgaacttcattttatttatcgatatgttgcactttgctatcccaaacggctctcacattttggggatcccaaatggatcttaattatgatttcagcggtatttggtcaaggacttttgtggtttttttctgtatattttcttatgtggccagattctgaaacgagatcgtaccttgttattccctttcgtagagactataatgcagatgttcataaaattccattattggctagtacctattggggagcatcaacacaactaattctgcgaacttcaactgcgatcattattgtaacacttatttcctgcttcacaatatgtttctgcatttggatcggatggacgatacaatcaaaattgaaagtagctgacatgagtaaaactactaaaagaatgcacagaaaccttctgaaagctctggccattcaaactttcattccatttgcaatcagctacatcccatgtgttgtcgcttggtctgttccaattatccacgtggatactaaaagtttgaacaactatacttctatcatagctgtagctgcattcccattcatcgatcctttggctatcatggttttcctccctgaatatcgaaaattgttcaccaaaatattcctcccatttctatataattcatccacagtttatccagaatccactgtccgagaaagttcgggaagaggataa

SEQ ID NO: 587 - DNA, 996 bp, Caenorhabditis elegans
atgatttatattaactggtatcaaaagaatatgccactaatttttggcatttcgagttatattgttaacccattgttcatctacttggtcctcaccaagtccagtaagcaaatgggtaaatatcgctttctactgattggctttgcggtttttgacgtcttttattcaatcgcggaaatgttaacgcctattgctgtgattaacacaggttatggttttgtgacattcatcactgatggcccattttccgaaaatgctaactatgctgtttcatcgcgatgcacgttcatctcaatgagctatgcacttctcatcatccattttgtctatcgatatctcattttgttttaccctcaccaagtggataagatgcttcaaccattcggaattcttgctatgattgttcttactgctggtcacggagcatcgtggacatggctctgtgagggctgcttgtcaccaaatgaagagataagagacatgatacggcctgcattcttagaaattcaccacgtcaactcggataatatttctctgttgacagggcagtatagaaacgctagtgactttgttgtctacaaaagtttgtttggtatcatgtcacttacattattttcgagctactgtatgtgtgtttatattattcttggctataaaataatgaagaaaatgaatgaaaacacaaatatgagctcgattagcgcaacactgaatcggcaactctttaaagcgctggttgctcagacgtgcatcccaatgttcgccagcttcctaccaactgtcatcgcctggtacgcaccgatgtttttgatcaatgttacttggtggaacaactacatctgtaatgttgcattggctgcctttccgttgattgaccccgctgtggtgatctacttcattccaaattacaaaaatactcttcttgtatggttccgattgaaaaagcccacagtaactgcagcattaacttcgatgttttctataccaacgatgtaa

SEQ ID NO: 588 - DNA, 870 bp, Caenorhabditis elegans
atgatatatctcaactggtatcacaaatatttgccaatcatttttggcgtgttgagttacatcgtcaacccattgttcatctatttggtcctcaccaaatccagcaaacatatggggaaatatcgatttttgttgattggctttgcggtttttgacatcttttattcaattgcagaaatgttgacacctattgctgtgataaacacaggatatgggtttgcgactttcatcactgatggctttttcactgaaaatgcaaactacgctatttcatctcgatgcacgtttatcgcgatcagctatgcacttctcatcatccattttgtatataggtatttcatcttgtttcaccctcatctcgtggataagatgcttcaacctcttggagtttttgctatgattgctctcacagctgcccacggagcatcgtggacttggctctgcgactggtgtttggcaccaaatgaagagatcagggatatcgtccggcctgcattcaaggaggtacaccatgtcaactcggataatatatccctgctcactgggcaatataggaatgccagcaattttgttgtctacaaaagttggttcggtatcttatcactcaccctattttcatgctactgcatgagtgtatatctagttcttggatataagattatgaagaaaatgaatcaaaataccaacatgagcacaattagtgcaacactaaaccggcaacttttcaaggcgctggttgcccaaacatgtatcccaatgttcgccagttttctaccaactgtcattgcctggtatgcgccgatgtttttgattaatgttacgtgtggaacaactatatctgcaatgttgctttatctgcttttccgttaa

SEQ ID NO: 589 - DNA, 1053 bp, Caenorhabditis elegans
atgatatatatgaactggtaccatcaaaatgttcccaaaattttgggagcactaagcttcctggtgaacccaatattcatatatttggtagtgaccaaaactaaaactcaagtggggagctacaagaatcttttgataatgttctcggtctttgacattctgtattcaatatccgagattttaactccattgggtgtacaaggcaacaagcatggatttgtggtttttatatcagacggcttgttctttgaatatccagaacttggtcagcacgcaatgtcgaatcggtgtgggttcatttccatcagttatgccttattgatcatccattttgtctatcggtacatggccttgttttacccgcacaagcttcatctgttcttccggccgattggtatactatttttaacattgctcatgttgtttcacgctggctcttggactatgatctgccagaattgccttgcggccgacgacgaagttaggaaaatagtgcgctcgtcgttcatagatcagtacggagaagagtccaatggagttccaatgttggcagctctctattggggtgtccgtccaggtatccaatttcgcagctggcttggaatcattcttcttactattatttcatggtactcaatggcggtttattttgttcttgggtataaaataattcacaaaattcggtgcatgactattaatcgaacgttgagtgcaactagtttacgacttcagaggcagctttttgtgactttggttgtacagacctgcatcccaattgtcgcaagcttcttaccaactgtcatctcctggtacgcaccaattttcggaattgacattggttggtggaacacaaacgtctccacaattgcactagctgccttcccatgcattgacccgctagctgtgataattttggttccgaactacagaaacacactactcagacgtccaatttcaattgagccggacacttcaggaaatatcaatccgcctatcagcaacgttgtcagtatggttcgccggataacaaccatagctggcactgcattttaa

SEQ ID NO: 590 - DNA, 1035 bp, Caenorhabditis elegans
atgatttacatcagctggtaccatcaaaattttccccgtattttcggggtgttcagctacataattaacccaatctttatctacctggcattgacaaaatccaaaactcaaatgggcaactatcggtttttgttggtggctttcgcagtttttgacctcttctactcgacgaatgagtttttgacccctttggcagtaaccggcaattcgcatggatttgtggtatttctcaccgaaggaccattcttcgagcatccagaacttggagcccacgcgatttccaatcgctgcggcttcatttccctgagctacgctttattgatcattcactttgtctacagatacatagccctgtttcatcctgaactgcatcgcaatttttttcatccaattggtgtgctgatctacgcgctctttttactcatacatggtgcatcgtggtctgtgatctgccagcaatgccttggcggtactgatgagatccgagagctgatccgggatgagtttatggcagaataccacgcagataccagggatgtaccaatgctggctgcactttattggaacgcaagtgacgctattcgtttccgtagttggctcggcatcgtcttactgactgtgatctcattttatgcgatgacaatttattttgtgttgggctacaagattatgagaaaaattcggtcaatgcaagcgaacagcagtatgagcaagaacagcattcggctgcagaaaaaactatttttgacgctaattattcagacctgcataccaatattcgccagctttctacctacagtactctcgtggtatgctccaattttcggaattgatttgtcttggtggaacaccaacgtggctaccgtagccctttctgctttcccattcatcgatccgttggctgtgatctacttggtgccaagctatcggaacgcgattttgagaaaaagagacccgacggtggctagcagttcagcaatacaaggggctaataagaatgcgtcgaaaattgattgtagcagtgggattaactaa

SEQ ID NO: 591 - DNA, 1029 bp, Caenorhabditis elegans
atgatctacattagctggtaccaccaaaatttgccacgtatttttggaatattcagctttatcataaacccaattttcatctacttggctatgactaaatctagatctcaaatgggcaagtacaagtatttgttgataatctttgcaatctttgatattttgtactcgatttctgaaatcttaacgccgattggtataactggaaacaagcatgggtttgtggtttttctaacagaaggtcctttttttgagcatccagaaattggtcaacatgtaatgtcaaatcggtgtggcttcatatcactaagctatgctctcctgataattcattttgtctacagatatatggctctgtttcacgccgacaagctgcccatattcttccaacctcttggaataatcatttccataatttttctcctaatgcacgcggcttcttggtcagtaatctgccaacaatgtctcgccggaaacgaagaggtccgtgaaatcatatcaatagacttcttggaaaattttggcgctaattcaaaatcgttgcctatgctagctgccatctattatgacgccagtgattatattcgttttcgtagctggctgggaatatttctgctcacagcattctccttttacgcaatgtcagtctacattattttgggattcaagataatgaggaaaatcacgttaatgcaatcgacaaacaagctcagcaaaaacagcatccgtctacaaaaacaactgtttcagacattaattatccagacgtgtatcccaatcattggtagtttcctgcctaccgtgatctcttggtacgcgccaattttcggggtcaacatggaatggtggaatatgaatgtggccacagttgcaatggcggcatttccgtttatcgacccacttgcggtgatctacctaattccgagctaccgcaacgcaattttgaggaaaagagggaatatagtagatgacagttctcatgtcaaaaccaggcaatcttcgaggatgcagtcatatgcttttagttcttaa

SEQ ID NO: 592 - DNA, 1017 bp, Caenorhabditis elegans
atgtatatccactggtctcaccattaccttccaaaattgtttggaattttgtcattcgtgtgtaatccaattttcatttgcttgatagccaccgaaaagaaggcttcgatcgggaagtatcgatatcttttgatagggtttgcaatttttgatatggcttactcaactgtagagctaatcgttcccgtagcaattcatggtactggggcagcttttgtgatttacctagctgacggaccattttttgggactgggaagcttggccaactagctgtctcaattcgatgtgggtgtatttctctttcatatggaatccttgtcattcactttatctatcggtatcttgtgctatttaacacccgaataatcgatcgacttctccggccgtccgggctatttggtctctttgtattttttgtttttcacggaatagcttggagttctgtctgcgagatgtgtctctatggagatcaagaagtgttcgactacatctatgacgcttttcaaaaagattaccatgtggattcacatgatttatccatgctaatggcattgtttttcgatgcaagtcccgagatcaaaagaagaagctggattggaattctgctgctgactggaatttcgatatatgcaatttctctatacgttattcttggatggaagattatgaaaaagctggcggataatccaggggtttctgcaacgactcagaaattgcatagacagttattcaaagcccttgcagttcagactttcatcccgatctgcatcagcttctccccttgcatgatggcctggtacggtcctgtaatcggattggatctcggaatgtggaacaattatttgggcgtcattgcactgtcagcgttccctgttctagatccacttgctatcattttcctcctacccaactaccggaacaagctttttcgcactgtgaaaatgccaatcaaatacttttattctggaacatcgactgtccgacccaacgtggataattcagctcaagtttattaa

SEQ ID NO: 593 - DNA, 1008 bp, Caenorhabditis elegans
atgaatataagatgggctcatcgatatattcccgcggcatttggatatttgtcattcgttttaaatcccatacttggctacctaattctcaccgagccaaaatccgcaacaattggaaagtatcgatacttaattttgttctttgcggtgtttgacatggtctactcaacagtagagttactggtaccactgggaatgcatggaactggttcagcttttgtcacgtatctcgctcatggaccattttttggaaaagatactattcgccttgcccagtttgcaatttctgtcagatgtggtttcattgcattgtcatatggcattctcatcattcacttcatttaccgctacatcgctcttttcaggcctcaattaattgatgacgtgttccggccgatgggaatatgttgcatgatgacatttttcctggcccacggagttgcatggactgccgtttgcgagctgtgtctgtacgcaaatgatgaaatcagggactacattcgaacgactttcagagatgagtatgacgtcgactcatatgacattgctttcgtggctgcactttacattgatggaagcaatgaaacaaaaaacaaaagttgggctgggatctttcttcttttcagcatttcttcgttcgctgtttcgttttatttaattctgggaagaaagatcgttgtcaaactgagaactcatactgcactctctcaacaaactcgaaacatgcacaggcagctcttcctagttttggcatttcaaacaatcatcccagtttgcatctgtttttctccttgtatgatggcgtggattggcccaatgttctacttggattttggaatgtgggacaactactttggggtcatcgcgttttcagctttcccattcttggaccctcttgctataatctgcctgcttccgaactacagaactcgtataaccggtgcatccgttttcacatcagtttctccagtgatgccaatcagtactgttccacctgttttaaattaa

SEQ ID NO: 594 - DNA, 1032 bp, Caenorhabditis elegans
atgtacattcactggacgaatcactattttcccaaaatttttggcattttgtcatttgtcgccaatccgattttcatgtatctgatagtgactgagcaaaaatcaaattcaatcggaaaatatcgatttttgatttttttctttgccatttttgatatgagctactcaacagttgagttgctagctccagtgggaattcatggcaccggagcagcttttgttgtgtgcttaacggatggcccattctatggaattaagaaccttcatcttgcccaacttgctgtatccatccgatgtggctgtatatctctttcctacggtattctgataattcatttcatttatagatacataacattgtttttcccaaaacttgttgccagtatctttcagtcaactggatgtatttgcattttcttgtttttcatcactcatggaattgtttgggcaggagtttgcgaactttttctctatggggacaatgaaatgagagactacatccgggatgcattccaaaaagactacggagttgattcctatgatattgcgtttctgggagcaatttacatggaagccagcgaccaagtggtggaacgtagttgggcaggaattctgattctgaccggaatatcaacgtatgccgtctcattgtacattgcacttgggtacaagataatgaaaaaactacgcgacaacccagcgatgtcagtgacaactaaaaacatgcacaaacaactgttccgtgctctgtccgtccaaacgatcatcccaatttgcatcagcttctccccgtgcttggtagcctggtatggaccggtgctaggatttgatctcggaatgtggaacaactacttgggagttatcgccttatccgcttttccatttatggaccctgttgccataatccttcttcttcccgcttaccggaatcgtgtttttggagttgtgccaaaagccccagtaatcgtgcccacattggttaccaggtcatcgcatcggtggacaacaactgctaatgttttggcgcattaa

SEQ ID NO: 595 - DNA, 1014 bp, Caenorhabditis elegans
atgttcgttaactgggcgcactatttggtgccgaaaatctcatttttcctatcgctcgtctttaatccggtttttgtataccttattcacagtagtaagcatgtgctattcggcaactacagatatctctcgtactttttcgcgattttcaatttgtgcgcgtcggcagcggatctacttattccagtggcggttttctattatcgctatacatttgtcacactagtggtcgatgcgatgagatcagagcagggagaagcgtccatcgcattcagatgttcatttatatcgggcacctatgggattttgaacattcattttattttccgatatctttctcttaaaagcaacaatattatcaagaactatttcatgccatatggtcttttattgtcagttatctatgtcctatttcacatgtcaatctgggcaatgatagactatttctgcttgcactcggctccggagatgagggattatattcggatcccgttcagaaaactgcataatgagagcatagacaacattaattttgtcgctggattgttttcggaagcatccccagacattgtgcaacgatcgtgggctgggatcgtgttgttgactatgatagcgagctactcgatgatactttattttgtcttgggatacaagatcataactggcctgcacatagaatcagtgacgatgagccaacaaactgctcaaatgcaaaaacaacttttcaaagcgctgaccatccagacaatcattcccatttgcgtgagcttcatgccttgctctttcagtttctatggagccgcttttaacatcggatttatgaactgggtgtactgggtctctgctgtcgccgtatcaatgttcccatttttggacccgctcgcaataattctactgctcccggctttacgtcgacgctctccgagagcgtcgacgtctccgagactccgtttggaaaagtacaatgatctaggatgtgacgtcatgattaagtaccttcaaattaaattttaa

SEQ ID NO: 596 - DNA, 1029 bp, Caenorhabditis elegans
atgtatatcaatttcgcccactgtatcatcccgaaaatctcggccgtttgctcggttttggttaatccattcacagtttatattgtgtggaatgataagaaacttcaactcggaaactatcgctatctgctactttattttgctctgttcaatatactcacatcgataatggatatgcttgtgccaatgtgcgttttaaattatcgctatgcgttttcagtttttgtttccgatggattttttgaagagtattccgattatcatcagttcattattgcgttccgatgtagtctgatttctggagcttatgcagttctgcactcccactttttgtataggttttttgttttgttcaacaatcagtttctgacacgatggttcatgccttatggacttctcacttccatattttatcttatttttcatgtcattttctggactatttgttgttggaaatacattggtggagactatgatcgacgtctatacattcgtgaatcaatgtttgagcatcatggagtagatgttatgaatattactataatcattgctcaatattttgaaggaactccaaatgccatgcgattatcaagaattggaattggatctatgtcagtactgtctataatttcacttgctttcattttctacttcggatacaaaatatgccacaaattaagcagtcagagttctgatatgagtgaaaaaactaaaaaacttcaaactcaattaatgaaagctctgactgttcaagcaataattccgacttgtgtgagttttgcgccatgcctctttgcttggtatcaaccagtttttggattggatttgggaagatggattcaatttgctgctggaattgctgtggccacatttccagcccttgatccactggctctcatttattttgtaccaacgttccggagaaagtttatagaaaagttgatgtttttcaagtttacgaaaaagaatcaaacagcgtgctctcaagtatccaatatacaagggaccagcgaagggactcaaaaataa

SEQ ID NO: 597 - DNA, 1008 bp, Caenorhabditis elegans
atgtatctcaactgggctcaccactatattccaaaaattggcggtgttttttcaattattatcaatttgctattcatatttattgctcatgacgataagcacgtgcattttggaaattatcgatttttattgatttttttcggaatttataatttattgtgcactgtagtggatttgattgttcctacgtgcgttatcgactataactacgcgttttcctactacgttgttgatggatattttgaaaaaacatctccatatgctccttttgttctatgccttcgaagcagcattatatcagccggctacggagttctgcacgctcattttgtttatcggtacttggtgctttttaaccaacaactcctgaacacctacttccttccctacggcttactactctctgtagctcactgcttcctgctcaccagcgcctggaccttctccgcctaccttcttctagtcccggagccagaaagaaggttttatatggctcaggtgataagtgaagttttatcacaaaatgtgcatgagatgaatattttgatagcggtttatgaggacctaagcccaaaagtcacttggaactccagacttggtgtattcttggtgtctatcatctcaatactatccgtacttatctacattttattcagcatcttaatcgtctctaaactccggagcaccgacctggcacttagccaaaaaaccaagcgactccagaagcagttggccaaatccctggcggttcaggccacaattccccttatcgtagatctttttccgtgcttttttgtgtggtacatgccgattttcaaagttaacattgggtactggacatattggttcgcgtcgatttttatatcgttttttccggttttcgaccccctggcgatgttttactttttgccggtgtttcgagttaggctccgacaaattttgagaatgaaagaacgacctgcaagggtttctgctatgactcatactgatatttctcgatttttttaa

SEQ ID NO: 598 - DNA, 1005 bp, Caenorhabditis elegans
atgtatatcaactgggctcatcactacattccaaaagtcggcggagcatgttcatttttcataaatgttctgttcatttatatagttcaagatgacaagaaagttcaaattggaaattataaaattttgttgctttcctttgcgatttacaatttagcaagtacggcaatagatttgatagtaccattgtgcatttttgactataaacgagcattttcatactttgtagtaactggactttttgaaaaaaaatctgcactcggagcaattgcgatttgcatccgttgtagcttcattccagcagcctatggaattctgcattcacattttatatatcgatatatggttctcttcaatcggcaagttctcacaaaatattttcttccatatggcttgattatgtctgttgcatattgcgctgtactgatggcgatatggttttatgctgcctatgtattcgtactggcacaaaaagaaagtcgtctttatttggaaacaatttttagggaaaaatttgatcaggatatcaatgacttgaacattgtgattgctttatatggagatgcaagtatagaaataatacgaaattcgtggactggaatattgatcggaacctttatttcattgtattcagttgtagtttatgttgtactcggaactcaaattgtccataaactccaaagtacagatttagtaatgagtgataagacgaagtatctccagaaacaattaatgaatgcactaatggtacaagctacaattccaatgatcgtctgctttacaccatgtttcttggcttggtaccttccagtctttaacctagatattggtaattggatatattggacatctactgttgccatttcattttttcccgttcttgatccactgtcgcttttttattttcttcctgtgtttggagcgagagttcgggaaattattggaattaaaagaaatacaacgagaatatcttcgggccttaaaatagccacactcaatagctaa

SEQ ID NO: 599 - DNA, 1002 bp, Caenorhabditis elegans
atgtgggatatcggttttgtgtacaggcatattccgaaacttttcggagccttagcgtttatagtcaacccaattttcgtatatctgattttcacagaaaaatcaacgaaattcgggaactataagtacttgttgctatattttgcaagttttaatttggtctactcagttgcaaatgttgtggtaccaattgatatccatagccatcgctactgcttctaccttttcatcagcgatgggctcttcttcggccagtccgattggcatttgcacatgctatcagccagatgcgccttggtgtctgctagctacgcggtgcttctgagccacttcatctatcgataccttgctcttcataacagcgaactgacaaatgacaagttccatacctatatgacaatttcttttggaatattctgcgtttattttgtagtgtggcacgcgtcttgcttctatcttggcggggccaatttggaaatcaaggagtacatccgaacagatttccgagatttttatcgaatggactctatggatatgaacatgatctcttgcttatatagagaaggaacagaccacacactgttgcgatcttggtcgacgacgatcctttggacatcaatttctgccatttccatttgcatgttcttgatgttggcgtgtatgataatgaaaaagctgaacaaaatgtcgtcatgcatgagcaagaaaacctcaacacttcagctagaactcctccgagctctaataattcaaactgtgattccaatttttgtgagcttcttcccatgtgtcataagcttcatcatcccaatatttgacttagatttgggaagaccaatcaactatgtggaggtcattgctctcggagcatttgcgttttgcgacccagtggctatagtcttgtgtctcccagtttttcgacaacgtgtgttgtgtcaaaagaaaaaaccgaagaagaagcagaatacagagataaacatgatgtcgacaattgcctcataa

SEQ ID NO: 600 - DNA, 996 bp, Caenorhabditis elegans
atgctcaccaactggatctacgtttttctgccaagaatctcatgtgctttggcgtgggtcgtgaaccctattttcatttatttgatttttacagaaagttcaaataaattcggaaactatcggtttctccttttgtattttgcacttttcaatctaacgtattcagttgtgaacatagtcgttccaattgacatcataacataccgttactgcttcatagtgattctgagagatggctggtttgtggaactctccgacttcaacttcagtttgttgtctgcacgttgctcgttggtgggcaccacatttgccctgatcctggttcatttcatataccgatacttggccatccagaattcttctctaacacgaaacaacttccattggtacatgaccggatcgatctttgcatcggtctttcatttttctgtgtggcacctgacttgcttgtacttcacgcgtgccgagtttgaaatgagacagtatgtgactcctggtataagaagaacttttgggaacgaaacaattgatttcaatattcttggaggcgtttttcatgaagtgccgaacagtgtcgtaaaacgaacatggattgccatactaacatgcacttctatctctgtcctgacaatcatcaaattcatagttttgagtagaatgattatcaacaagctcaacaacatgtctatcacggctagcaagaaaactgcacgtttccaatttgaactttttcgagccctaatcgttcaaacaactatacccattgtgatcagctttgcaccgtgtctcttctgttggtacattccaatgtttggaattgaattgccaagagccttcaattattatgaagtcagtgcctttggaatttttccattcgtcgatccaattgctatcatcttatgcctccccatcttccgaacccgaattttccgttttttgagttcaatttcttctggtttctttgaaaaacctagtaatgcttcccgaaccaagtaa

SEQ ID NO: 601 - DNA, 1053 bp, Caenorhabditis elegans
atgtttgaggactggatttacaagtatctaccaagaacattttgtgccctaactttcttggtgaatcctatatttatttatctgattttctcagaaaagtcttcaaagtttggaaactatcgatatttgttgttgtatttcgctattttcaaccttctttattcaatcatgaatgttttggttccactggacattcataccttcggctactcatttttcttgattgtcagacacggctggtttcaaactgaaggaaatagttctcaactgaatttccatatgctcattgctcgtacttcctctgtatcgtctagctacgcagttttaatgagtcacttcatttatcgatatcttgtgatcagtgattcaagtttaacaagacatcacttccattggtttatgactggatccgtttatatgttgtttgcatatttttctgtgtggcacgcaacgtgttattttcccggcaaagcaaattcggaacttctcgaatatgttagtgaagattttcaagaaaattttggaatggattcaaggaatttgaatgtgattggaacactgtttagcgtaggatctcacgaaactaccctacgggcatggacggctatgtcgatttggtcaacaatttctattgcatcaatcataacatttttcgtgatggctggacttgttatgcgaaaactcaggaaaatgactgtgagaacaagccaaaagacatcacaatttcaatttgagctcctcagagctctaattgttcaaacggtcaccccaatctgcttcagtttctcaccgtgtctactatgttggtatagcccaatatttggaatcaagctagacagatggttgaattatctcgaagtgaccgctttagggctgttctctttcatggacccaattgcaattattctgtgtcttcccatatttcgttacaggattttcaacgtcattaattgtattgcaagagcctgtgccaaaaatcaatcagataacgattcgaaacgagaaaattcaactcaaacaattaatttgcggaaggcaatttctattcattaa

SEQ ID NO: 602 - DNA, 996 bp, Caenorhabditis elegans
atgcaatccagtgataatatcaacaacacgtggtttgatgagtttaatagtgtattcactggggttttatctctaatttttaatattgctttgatactcgtaacatcaaaagttaaaatatattcggactatgtgaaacggatgcaaatatttggcgcagttttgagactgattttttcagttttaattgtgtttagctccccgacacttgcttatataacagatgctgaagctgtttacattgttaaaggcggattttcattgcctattaaactgggaagagctatgctcattacctttgtaacatttgtcattttttcgtgtatgggacctccgatgcaatttcttcaaatggtttttattgtgaaaaaaacaacgagaacacaaaaaaacgtggtccttacaaccacaatcatatcatttattgtctctctaatatccacagttctaatcacctttggctatgtcccagatgctgctgacgatcaactatcagaatatatcgtatacaatctgaatggaatcggaaaatctgcatatttaattgcatcactagaaagatatgattacacgttgaatgactttgttgctgacccaatttcatgggcatgtacgatttatataatggctgttctagtgataactacagtaattgcgatggtttgttggacaattatcagatacgaaattcataagggaagtcggagtacaaattcgatgaagtctcaacaacaattgaatatggtacttatggttcagttcattctaccatttctcactatccacattccattctatgtgtcttttctaatgccattatttcgtatcgagacttctcatctgtcagtttatctaccgtatcttttttcttggtgtccggctttaaatccaattttagtaatgattatggtaaagagtattcgagaaaaggcatttgatgcgatgagtattggttcaagaagtcactcgactatcattaatgttttcaatagataa

SEQ ID NO: 603 - DNA, 1011 bp, Caenorhabditis elegans
atgacgactccaattcctgaagagcttcacgaaacttttgtaaatgaagcaaatgcctacattgccggctttgtctcattaattgctaatttagttctgatttatgtcacttcaaaagttaaaacgtattccaaagagttccaatggacacagtactatgtggcaattctaaggctcatattttcaatggtagttgtagtgacatcaccgacattagtctatgtctcaaaaatgaaatcattgtacattgtaaaaggcggattctttttgccatttgatatgggaacatttttcctcactctatttgtattttttgttgttatttcatgttgttcgccaacgattcaatatctgcaaatttgtcacgttttatccgacaatggtcacaagaaccccaagtttggtccaattatctctacaatttccgtaatttttggaattcccactctcatacttgtctattttggatatacaccatctccggaagaagccacggaagccaagcaaattgtatattatttaaatggggagggtgatagtgcttttctcatgatcactgctaaaagaggaggtactattgattggacatcaattatttgtacggtttacatctttgttattatgatttcttcgtcgattactgtatttatatgtgcaattaacatttataaacaaatgaaaaagaagatgctgagcgatgctgcgaagaaatcccagcagcaaattaatttgattctgcttcttcagttcttatttccatttcttcttatccatatcccgttttatgaatcgtttatatttccaatttttaatatcgaaaatccatttctagcaaataatttgccgtttttgttttcctggtgtccggctatcaatccaattttggttatggtcatggttaagaatgtgcgtgatagattactatgcagatcagccggctcgaaaatctcatcaagtaatatgattcaagtacgccagcaatcacaagtggtcagctcacgtctgaaataa

SEQ ID NO: 604 - DNA, 906 bp, Caenorhabditis elegans
atggaaactaccgctcaaaggatgtatcaaagtttcaataacagtttcatcgatgacattaactgttatatttctaactgttatatttcgcgggttcaggcaattatttactcgaaaagtatggcatcattatacataattaaaaatggatttgactttcccacaccagtaggtgatgtgtttctatcactttttgtggcttttattgttatgtcttgtaatggaccagcagtacaatatctccaagttgctcatcttctctcttcatcatcaaaaaaggaagctaataaagcaatctcaacaatgccgattgcagttgttatcagttcccttattcttattttctttggatatgttcctccattttacgaaattcacataagcagcctcgtattagaaaaaatcgccgagcaaggagacacggctttcttgattgttactgtgagattgacaatcgaagacacgaacacatttcaacttttatctcaaatatgtacacttttcattctaatcgtcatgttcatatcaattattattgtaattttgtgctacacttttattcaaaaacaaatgaaaacccgcttttccgcaagctcgatcactaaaaaatctcaggaacaattaaacatgacgctattattgcagttcatacttccatttgtaacaattcatgttccgttctacatcattgttatacttccattctttagaattgccggacgagttctttcagatcatttgcttctacttttctgttggtgtccagctatcaatcctattttagtaattctaatgatcaagaacgtccaagatcaacttattccaaaaaagttttccaaaacatcaacaatgtcaaaactaagccaagcccaaagtaaatccatccgagttattaatttggaataa

SEQ ID NO: 605 - DNA, 1050 bp, Caenorhabditis elegans
atgacttctacagctcccccggaaagtgaatcttcggatgacattggtccacctgcggaacttggtccgattatccgtagttatcacttttacaatgatctggttgccggtgtattaagcattatgctcaatgttcttgtgatattagtatttactacacggatatcaactgcttcaaaactattcaaaaaagtgatgacagttacaaaacttgtcgagatgttgtttagcgcaagttatattttgacagctccggtattcacatcaatttcggtcgatgattcatttactggtcttatgattgttaatactgggtggcaattcaatttctattatagtcaaattgttcttgccgcggcacttgtttttctaactcaacaaatttttctagccccttggctttactacattagatatgatcaagtttgcaaaaaacatggtgttagatgtatcgatttcttaaaaatgctaattatcaatttaatttttcaagttctcacatcagtgagcctttgcttttcgtctttcccaactagtaaggacataaccgagcttcaatttgttgccaataagtttactggttcaaactctgcatttcttcttttatcatatacgaaagaagtggatactgtcagggaacagattgaacacgtcggatcaataatgtctgcggttgcttacgtattaactttaatcttgtcaattttggtcatgattttgtgcacgataaaaatcaatttaaaagttcgagaatcaaaaaactcaagtaacaatttattggtactgcagaagaagatgaatcgagttttattggcacagttcttctgtccattaatattcattcaagctccattctactattcagtccttggtccgatagttggactttcccaaggccttgttacagaccttctccctctcctttttgcctggtcacctgttgtaaacaccctttttatattcattctaaattcggaaattcgaaatgcattgatcggaaaacaacatgtatcaacttctgaagttcggtcatttgcaaataaaagctaa

SEQ ID NO: 606 - DNA, 1077 bp, Caenorhabditis elegans
atgaattttgaaaagttcttgtttcctccaccgcctctacctgggaatagaacatcaatgcagctggggccaccgtctgagcttgcaccagttatccagagatatcatttttacaacgatcttattgctggaattttaagtatcacaattggtagtttgctcatttttctagtcacaactagaatttcaacgcccacgagattattcaagaaagttcaagcaatttcaaagtgcacggagattttgtttagcgcgagttatattctgacagctccggtattcacatcaattgtaatgaacgatacattttctggtctaatgattgtcaacactggatggcaattcaattttcatttcagtcaaatatttctttcagcagctctatttttactcactgagcaaatatttctagcgccatggcattattatattagatatgcacaagtttgcagaaagggcgccggatgtattgacgtatcaattatagttgttttgaatattattctacaaattctaacttcaatgaacctatgctacgcagctcttccgactagtgaggacatacaattactacaagagattgcaaataagtttactttatcatattccgcatttcttcttttgtcttataaaaaagaagtggactctgttgcggactctgtcgacaaagttctatcgattatttcagcagttagttatgtatcaagtctagtattttcaatttttctcatgatatttttcactattaaaatgaacctcaaaattcgagaatctacaaatacgagcagcaatttgctagagttgcagaggaaattaaataggctgcttttggcgcagtttttctccccattaatatttattcaagttccattctactattcagtccttggcccaattgttggactgtcgcaaggccttgtaacagaccttttccctctcctctttgcctggtcacctgttttcaacacatttctcattttcattctaaactctgaaatccgaagtgctctcatcggaaaacaacgtacgtccacaacatctgatgctcgacgatcagttggtggtaatcaaaactaa

1. A yeast cell comprising
i) a first high copy number extrachromosomal polynucleotide comprising a first polynucleotide encoding a nematode G protein coupled receptor (GPCR) operably linked to a constitutive promoter,
ii) a second high copy number extrachromosomal polynucleotide comprising a second polynucleotide encoding a galactosidase, or a selectable growth marker, operably linked to a promoter activated by the yeast MAP kinase pathway, wherein the promoter is not a FUS-1 promoter,
iii) a mutated yeast gpa-1 gene, and
iv) a third polynucleotide encoding a chimeric G protein comprising the N-terminus of a yeast gpa-1 and at least four C-terminal amino acids of a nematode G protein, operably linked to a promoter,
wherein each promoter directs expression of the polynucleotides in the cell.

2. The yeast cell of claim 1, wherein the yeast further has a mutated sst-1 gene and a mutated far-1 gene.

3. The yeast cell of claim 1 or claim 2, wherein the yeast further has a mutated ste-2 gene.

4. The yeast cell according to any one of claims 1 to 3, wherein the promoter activated by the yeast MAP kinase pathway is the FIG-1 or FIG-2 promoter.

5. The yeast cell according to any one of claims 1 to 4, wherein the constitutive promoter operably linked to the first polynucleotide is selected from the PGK promoter, the ADH-1 promoter, ENO promoter, the PYK-1 promoter, and the CYC-1 promoter.

5. The yeast cell according to any one of claims 1 to 5, wherein the cell comprises at least 100 copies of each of the first and second high copy number extrachromosomal polynucleotides.

6. The yeast cell according to any one of claims 1 to 5, wherein the yeast is Saccharomyces cerevisiae.

7. The yeast cell according to any one of claims 1 to 6, wherein the yeast is haploid.

8. The yeast cell according to any one of claims 1 to 7, wherein the yeast is mating type a.

9. The yeast cell according to any one of claims 1 to 8, wherein the third polynucleotide is stably integrated into the genome of the yeast cell.

10. The yeast cell according to any one of claims 1 to 9, wherein the nematode is Caenorhabditis elegans.

11. The yeast cell according to any one of claims 1 to 10, wherein the nematode GPCR is a chemoreceptor, odorant receptor or taste receptor.

12. The yeast cell according to any one of claims 1 to 11, wherein the nematode GPCR comprises an amino acid sequence which is at least 80% identical to one or more of SEQ ID NO's 1 to 297.

13. The yeast cell according to any one of claims 1 to 12, wherein the chimeric G protein comprises about 5 C-terminal amino acids of the nematode G protein.

14. The yeast cell according to any one of claims 1 to 13, wherein the selectable growth marker is a nutritional marker or antibiotic resistance marker.

15. The yeast cell of claim 14, wherein the nutritional marker is selected from HIS3, ADE2, URA2, LYS2, ARG2, LEU2, TRP1, MET15, HIS4, URA3, URA5, SFA1, LYS5, ILV2, FBA1, PSE1, PDI1 and PGK1.

16. The yeast cell according to any one of claims 1 to 15, wherein the galactosidase is a β-galactosidase or an α-galactosidase.

17. The yeast cell of claim 16, wherein the β-galactosidase is LacZ.

18. The yeast cell according to any one of claims 1 to 17, wherein the promoter operably linked to the third polynucleotide encoding the chimeric G protein is the endogenous gpa-1 promoter.

19. The yeast cell according to any one of claims 1 to 18, wherein the first and second extrachromosomal polynucleotides are a plasmid.

20. A population or library of yeast cells according to any one of claims 1 to 19, wherein at least 10 of the yeast cells have different nematode GPCRs.

21. The population or library of claim 20, wherein on average each yeast cell comprises at least 100 copies of each of the first and second high copy number extrachromosomal polynucleotides.

22. The population or library of claim 20 or claim 21 which comprises at least 10, at least 25, at least 50, at least 100, at least 200, at least 250, or all of the nematode GPCRs which comprise an amino acid sequence provided as SEQ ID NO's 1 to 297.

23. A composition comprising a yeast cell according to any one of claims 1 to 19, or the population of yeast cells according to any one of claims 20 to 22.

24. A method of screening for a ligand that binds and activates a nematode G protein coupled receptor, the method comprising
i) contacting a yeast cell according to any one of claims 1 to 19 with a candidate ligand, and
ii) determining if the cell expresses galactosidase, or the selectable growth marker,
wherein the presence of galactosidase activity, or activity of the selectable growth marker, indicates that the ligand binds and activates a nematode G protein coupled receptor.

25. The method of claim 24, wherein the z factor of the method when the ligand binds and activates a nematode G protein coupled receptor is about 0.5 to 1.

26. The method of claim 24 or claim 25, wherein the ligand is volatile.

27. The method according to any one of claims 24 to 26, wherein the ligand is from a library of compounds.

28. The method according to any one of claims 24 to 27, wherein the method comprises screening a population or library according to any one of claims 20 to 23.

29. A method of detecting a ligand in a sample, the method comprising
i) contacting at least one yeast cell according to any one of claims 1 to 19 which comprises a nematode G protein coupled receptor which binds and is activated by the ligand,
ii) determining if the cell expresses galactosidase, or the selectable growth marker,
wherein the presence of galactosidase activity, or activity of the selectable growth marker, indicates that the ligand is present in the sample.

30. A method of detecting cyclohexanone in a sample, the method comprising
i) contacting the sample with a polypeptide which comprises an animo acid sequence provided as SEQ ID NO:26 or SEQ ID NO:287, or a variant thereof which binds cyclohexanone, and
ii) detecting whether the polypeptide is bound to cyclohexanone.

31. The method of claim 30, wherein the polypeptide is detectably labelled.

32. The method of claim 30 or claim 31, wherein the variant comprises an animo acid sequence which is at least 80% identical to SEQ ID NO:26 or SEQ ID NO:287, or a cyclohexanone binding fragment thereof.
